(19) United States
(12) Patent Application Publication
(10) Pub. No.: US 2022/0056469 A1
(43) Pub. Date: Feb. 24, 2022

(54) INSECTICIDAL PROTEINS AND METHODS FOR THEIR USE

(71) Applicant: PIONEER HI-BRED INTERNATIONAL, INC., JOHNSTON, IA (US)

(72) Inventors: DANIEL J ALTIER, GRANGER, IA (US); JENNIFER KARA BARRY, AMES, IA (US); CHRISTIAN BARTHOLOMAY, MADISON, WI (US); HUA DONG, JOHNSTON, IA (US); RYAN MICHAEL GERBER, APEX, NC (US); JACOB GILLIAM, NORWALK, IA (US); STEVEN D GRUVER, PACIFICA, CA (US); LU LIU, PALO ALTO, CA (US); JARRED KENNETH ORAL, JOHNSTON, IA (US); JESSICA O'REAR, REDWOOD CITY, CA (US); UTE SCHELLENBERGER, PALO ALTO, CA (US); ERIC SCHEPERS, PORT DEPOSIT, MD (US); DANIEL JAMES THORPE, JOHNSTON, IA (US); THOMAS CHAD WOLFE, DES MOINES, IA (US); WEIPING XIE, EAST PALO ALTO, CA (US); NASSER YALPANI, KELOWNA (CA); YOU YOU, FREMONT, CA (US); GENHAI ZHU, SAN JOSE, CA (US)

(73) Assignee: PIONEER HI-BRED INTERNATIONAL, INC., JOHNSTON, IA (US)

(21) Appl. No.: 17/274,888

(22) PCT Filed: Sep. 10, 2019
(86) PCT No.: PCT/US19/50434

§ 371 Date: Mar. 10, 2021

Related U.S. Application Data
(60) Provisional application No. 62/729,759, filed on Sep. 11, 2018.

(51) Int. Cl. C12N 15/82; C07K 14/21; A01N 63/50; C07K 14/195

(52) U.S. Cl. CPC C12N 15/8286; C07K 14/195; A01N 63/50; C07K 14/21

(57) ABSTRACT

Compositions and methods for controlling pests are provided. The methods involve transforming organisms with a nucleic acid sequence encoding an insecticidal protein. In particular, the nucleic acid sequences are useful for preparing plants and microorganisms that possess insecticidal activity. Thus, transformed bacteria, plants, plant cells, plant tissues and seeds are provided. Compositions are insecticidal nucleic acids and proteins of bacterial species. The sequences find use in the construction of expression vectors for subsequent transformation into organisms of interest including plants, as probes for the isolation of other homologous (or partially homologous) genes. The pesticidal proteins find use in controlling, inhibiting growth or killing Lepidopteran, Coleopteran, Dipteran, fungal, Hemipteran and nematode pest populations and for producing compositions with insecticidal activity.

### REFERENCE TO SEQUENCE LISTING SUBMITTED ELECTRONICALLY

[0001] The official copy of the sequence listing is submitted electronically via EFS-Web as an ASCII formatted sequence listing with a file named “6456WOPCT_SequenceListing” created on Sep. 10, 2019, and having a size of 1,557 kilobytes and is filed concurrently with the specification. The sequence listing contained in this ASCII formatted document is part of the specification and is herein incorporated by reference in its entirety.

### FIELD

[0002] This disclosure relates to the field of molecular biology. Provided are novel genes encoding pesticidal proteins. These pesticidal proteins and the nucleic acid sequences encoding them are useful in preparing pesticidal formulations and in the production of transgenic pest-resistant plants.

### BACKGROUND

[0003] Biological control of insect pests of agricultural significance using a microbial agent, such as fungi, bacteria or another species of insect affords an environmentally friendly and commercially attractive alternative to synthetic chemical pesticides. The use of biopesticides presents a lower risk of pollution and environmental hazards and biopesticides provide greater target specificity than is characteristic of traditional broad-spectrum chemical insecticides. In addition, biopesticides often cost less to produce and thus improve economic yield for a wide variety of crops.

[0004] Certain species of microorganisms of the genus Bacillus are known to possess pesticidal activity against a range of insect pests including Lepidoptera, Diptera, Coleoptera, Hemiptera and others. Bacillus thuringiensis (Bt) and Bacillus popilliae are among the most successful biocontrol agents discovered to date. Insect pathogenicity has also been attributed to strains of B. larvae, B. lentimorbus, B. sphaericus and B. cereus. Microbial insecticides, particularly those obtained from Bacillus strains, have played an important role in agriculture as alternatives to chemical pest control.

[0005] Crop plants have been developed with enhanced insect resistance by genetically engineering crop plants to produce pesticidal proteins from Bacillus. For example, corn and cotton plants have been genetically engineered to produce pesticidal proteins isolated from strains of Bacillus thuringiensis. These genetically engineered crops are now widely used in agriculture and have provided the farmer with an environmentally friendly alternative to traditional insect-control methods. While they have proven to be very successful commercially, these genetically engineered, insect-resistant crop plants provide resistance to only a narrow range of the economically important insect pests. In some cases, insects can develop resistance to different insecticidal compounds, which raises the need to identify alternative biological control agents for pest control.

[0006] Accordingly, there remains a need for new pesticidal proteins with different ranges of insecticidal activity against insect pests, e.g., insecticidal proteins which are active against a variety of insects in the order Lepidoptera and the order Coleoptera including but not limited to insect pests that have developed resistance to existing insecticides.

### SUMMARY

[0007] In one aspect, compositions and methods for conferring pesticidal activity to bacteria, plants, plant cells, tissues and seeds are provided. Compositions include nucleic acid molecules encoding sequences for pesticidal and insecticidal polypeptides, vectors comprising those nucleic acid molecules, and host cells comprising the vectors. Compositions also include the pesticidal polypeptide sequences and antibodies to those polypeptides. Compositions also comprise transformed bacteria, plants, plant cells, tissues and seeds.

[0008] In another aspect, isolated or recombinant nucleic acid molecules are provided encoding IPD092-1 polypeptides, IPD092-2 polypeptides, IPD095-1 polypeptides, IPD095-2 polypeptides, IPD097 polypeptides, IPD099-1 polypeptides, IPD099-2 polypeptides, IPD099-3 polypeptides, IPD100-1 polypeptides, IPD100-2 polypeptides, IPD105 polypeptides, IPD106-1 polypeptides, IPD106-2 polypeptides, IPD107 polypeptides, IPD111 polypeptides, and IPD112 polypeptides including amino acid substitutions, deletions, insertions, and insecticidally active portions thereof. Nucleic acid sequences that are complementary to a nucleic acid sequence of the embodiments or that hybridize to a sequence of the embodiments are also encompassed. The nucleic acid sequences can be used in DNA constructs or expression cassettes for transformation and expression in organisms, including microorganisms and plants. The nucleotide or amino acid sequences may be synthetic sequences that have been designed for expression in an organism including, but not limited to, a microorganism or a plant.

[0009] In another aspect, IPD092-1 polypeptides, IPD092-2 polypeptides, IPD095-1 polypeptides, IPD095-2 polypeptides, IPD097 polypeptides, IPD099-1 polypeptides, IPD099-2 polypeptides, IPD099-3 polypeptides, IPD100-1 polypeptides, IPD100-2 polypeptides, IPD105 polypeptides, IPD106-1 polypeptides, IPD106-2 polypeptides, IPD107 polypeptides, IPD111 polypeptides, and IPD112 polypeptides are encompassed. Also provided are isolated or recombinant IPD092-1 polypeptides, IPD092-2 polypeptides, IPD095-1 polypeptides, IPD095-2 polypeptides, IPD097 polypeptides, IPD099-1 polypeptides, IPD099-2 polypeptides, IPD099-3 polypeptides, IPD100-1 polypeptides, IPD100-2 polypeptides, IPD105 polypeptides, IPD106-1 polypeptides, IPD106-2 polypeptides, IPD107 polypeptides, IPD111 polypeptides, and IPD112 polypeptides, as well as amino acid substitutions, deletions, insertions, insecticidally active portions thereof and combinations thereof are provided.

[0010] In another aspect, methods are provided for producing the polypeptides and for using those polypeptides for controlling or killing a Lepidopteran, Coleopteran, nematode, fungi, and/or Dipteran pests. The transgenic plants of the embodiments express one or more of the pesticidal sequences disclosed herein. In various embodiments, the transgenic plant further comprises one or more additional genes for insect resistance, for example, one or more additional genes for controlling Coleopteran, Lepidopteran, Hemipteran or nematode pests. It will be understood by one of skill in the art that the transgenic plant may comprise any gene imparting an agronomic trait of interest.

[0011] In another aspect, methods for detecting the nucleic acids and polypeptides of the embodiments in a sample are also included. A kit for detecting the presence of a polypeptide of the disclosure or detecting the presence of a polynucleotide encoding a polypeptide of the disclosure in a sample is provided. The kit may be provided along with all reagents and control samples necessary for carrying out a method for detecting the intended agent, as well as instructions for use.

[0012] In another aspect, the compositions and methods of the embodiments are useful to produce organisms with enhanced pest resistance or tolerance. These organisms and compositions comprising the organisms are desirable for agricultural purposes. The compositions of the embodiments are also useful for generating altered or improved proteins that have pesticidal activity or for detecting the presence of the polypeptides of the disclosure.

### BRIEF DESCRIPTION OF THE FIGURES

[0013] FIG. 1A-1B shows an amino acid sequence alignment, using the ALIGNX® module of the Vector NTI® suite, of IPD092-1Aa polypeptide (SEQ ID NO: 1), IPD092-1Ab polypeptide (SEQ ID NO: 3), IPD092-1Ba polypeptide (SEQ ID NO: 5), IPD092-1Bb polypeptide (SEQ ID NO: 7), IPD092-1Ca polypeptide (SEQ ID NO: 9), IPD092-1Cb polypeptide (SEQ ID NO: 11), IPD092-1Da polypeptide (SEQ ID NO: 13), IPD092-1Db polypeptide (SEQ ID NO: 15), IPD092-1Ea polypeptide (SEQ ID NO: 17), IPD092-1Eb polypeptide (SEQ ID NO: 19), IPD092-1Fa polypeptide (SEQ ID NO: 22), IPD092-1Fb polypeptide (SEQ ID NO: 24), and IPD092-1Fc polypeptide (SEQ ID NO: 26). The amino acid sequence diversity between the amino acid sequences is highlighted.

[0014] FIG. 2A-2B shows an amino acid sequence alignment, using the ALIGNX® module of the Vector NTI® suite, of IPD092-2Aa polypeptide (SEQ ID NO: 2), IPD092-2Ab polypeptide (SEQ ID NO: 4), IPD092-2Ba polypeptide (SEQ ID NO: 6), IPD092-2Bb polypeptide (SEQ ID NO: 8), IPD092-2Ca polypeptide (SEQ ID NO: 10), IPD092-2Cb polypeptide (SEQ ID NO: 12), IPD092-2Da polypeptide (SEQ ID NO:14), IPD092-2Db polypeptide (SEQ ID NO: 16), IPD092-2Ea polypeptide (SEQ ID NO: 18), IPD092-2Eb polypeptide (SEQ ID NO: 20), IPD092-2Ec polypeptide (SEQ ID NO: 21), IPD092-2Fa polypeptide (SEQ ID NO: 23), IPD092Fb-2 polypeptide (SEQ ID NO: 25. The amino acid sequence diversity between the amino acid sequences is highlighted.

### DETAILED DESCRIPTION

[0015] It is to be understood that this disclosure is not limited to the methodologies, protocols, cell lines, genera, and reagents described, as such may vary. It is also to be understood that the terminology used herein is for the purpose of describing embodiments only, and is not intended to limit the scope of the present disclosure.

[0016] As used herein the singular forms “a”, “and”, and “the” include plural referents unless the context clearly dictates otherwise. Thus, for example, reference to “a cell” includes a plurality of such cells and reference to “the protein” includes reference to one or more proteins and equivalents thereof. All technical and scientific terms used herein have the same meaning as commonly understood to one of ordinary skill in the art to which this disclosure belongs unless clearly indicated otherwise.

[0017] The present disclosure is drawn to compositions and methods for controlling pests. The methods involve transforming organisms with nucleic acid sequences encoding IPD092-1 polypeptides, IPD092-2 polypeptides, IPD095-1 polypeptides, IPD095-2 polypeptides, IPD097 polypeptides, IPD099-1 polypeptides, IPD099-2 polypeptides, IPD099-3 polypeptides, IPD100-1 polypeptides, IPD100-2 polypeptides, IPD105 polypeptides, IPD106-1 polypeptides, IPD106-2 polypeptides, IPD107 polypeptides, IPD111 polypeptides, and IPD112 polypeptides. The nucleic acid sequences of the embodiments are useful for preparing plants and microorganisms that possess pesticidal activity. Thus, transformed bacteria, plants, plant cells, plant tissues and seeds are provided. The compositions include pesticidal nucleic acids and proteins of bacterial species. The nucleic acid sequences find use in the construction of expression vectors for subsequent transformation into organisms of interest, as probes for the isolation of other homologous (or partially homologous) genes, and for the generation of altered IPD092-1 polypeptides, IPD092-2 polypeptides, IPD095-1 polypeptides, IPD095-2 polypeptides, IPD097 polypeptides, IPD099-1 polypeptides, IPD099-2 polypeptides, IPD099-3 polypeptides, IPD100-1 polypeptides, IPD100-2 polypeptides, IPD105 polypeptides, IPD106-1 polypeptides, IPD106-2 polypeptides, IPD107 polypeptides, IPD111 polypeptides, and IPD112 polypeptides by methods such as site directed mutagenesis, domain swapping or DNA shuffling. The IPD092-1 polypeptides, IPD092-2 polypeptides, IPD095-1 polypeptides, IPD095-2 polypeptides, IPD097 polypeptides, IPD099-1 polypeptides, IPD099-2 polypeptides, IPD099-3 polypeptides, IPD100-1 polypeptides, IPD100-2 polypeptides, IPD105 polypeptides, IPD106-1 polypeptides, IPD106-2 polypeptides, IPD107 polypeptides, IPD111 polypeptides, and IPD112 polypeptides find use in controlling or killing Lepidopteran, Coleopteran, Dipteran, fungal, Hemipteran and nematode pest populations and for producing compositions with pesticidal activity. Insect pests of interest include, but are not limited to, Lepidoptera species including but not limited to: Corn Earworm, (CEVV) (Helicoverpa zea), European Corn Borer (ECB) (Ostrinia nubialis), diamond-back moth, e.g., Helicoverpa zea Boddie; soybean looper, e.g., Pseudoplusia includens Walker; and velvet bean caterpillar e.g., Anticarsia gemmatalis Hübner and Coleoptera species including but not limited to Western corn rootworm (Diabrotica virgifera)—WCRW, Southern corn rootworm (Diabrotica undecimpunctata howardi)—SCRW, and Northern corn rootworm (Diabrotica barberi)—NCRW.

[0018] By “pesticidal toxin” or “pesticidal protein” or “insecticidal protein” is used herein to refer to a toxin that has toxic activity against one or more pests, including, but not limited to, members of the Lepidoptera, Diptera, Hemiptera and Coleoptera orders or the Nematoda phylum or a protein that has homology to such a protein. Pesticidal proteins have been isolated from organisms including, for example, Bacillus sp., Pseudomonas sp., Photorhabdus sp., Xenorhabdus sp., Clostridium bifermentans and Paenibacillus popilliae.

[0019] In some embodiments, the polypeptide of the disclosure includes an amino acid sequence deduced from the full-length nucleic acid sequence disclosed herein and amino acid sequences that are shorter than the full-length sequences, either due to the use of an alternate downstream start site or due to processing that produces a shorter protein having pesticidal activity. Processing may occur in the organism the protein is expressed in or in the pest after ingestion of the protein.

[0020] Thus, provided herein are novel isolated or recombinant nucleic acid sequences that confer pesticidal activity. Also provided are the amino acid sequences of polypeptides of the disclosure. The protein resulting from translation of these genes encoding the polypeptides of the disclosure allows cells to control or kill pests that ingest it.

### IPD092-1 and IPD092-2 Proteins and Variants and Fragments Thereof

[0021] IPD092-1 and IPD092-2 polypeptides are encompassed by the disclosure. “IPD092-1 polypeptide”, and “IPD092-1 protein” as used herein interchangeably refers to a polypeptide having insecticidal activity, in combination with a IPD092-2 polypeptide, against one or more insect pests of the Lepidoptera and/or Coleoptera orders including but not limited to Western corn rootworm (WCRW), and is sufficiently homologous to the IPD092-1 polypeptide of SEQ ID NO: 1. A variety of IPD092-1 polypeptide homologs are contemplated. Sources of IPD092-1 polypeptide homologs or related proteins include bacterial species selected from but not limited to Pseudomonas species, Chromobacterium species, Burkholderia species, and Woodsholea species. Alignment of the amino acid sequences of IPD092-1 polypeptide homologs (for example—FIG. 1A-1B), allows for the identification of residues that are highly conserved amongst the natural homologs of this family.

[0022] “Sufficiently homologous” is used herein to refer to an amino acid sequence that has at least about 40%, 45%, 50%, 51%, 52%, 53%, 54%, 55%, 56%, 57%, 58%, 59%, 60%, 61%, 62%, 63%, 64%, 65%, 66%, 67%, 68%, 69%, 70%, 71%, 72%, 73%, 74%, 75%, 76%, 77%, 78%, 79%, 80%, 81%, 82%, 83%, 84%, 85%, 86%, 87%, 88%, 89%, 90%, 91%, 92%, 93%, 94%, 95%, 96%, 97%, 98%, 99% or greater sequence homology compared to a reference sequence using one of the alignment programs described herein using standard parameters. In some embodiments, the sequence homology is against the full-length sequence of an IPD092-1 polypeptide. In some embodiments, the IPD092-1 polypeptide has at least about 40%, 45%, 50%, 51%, 52%, 53%, 54%, 55%, 56%, 57%, 58%, 59%, 60%, 61%, 62%, 63%, 64%, 65%, 66%, 67%, 68%, 69%, 70%, 71%, 72%, 73%, 74%, 75%, 76%, 77%, 78%, 79%, 80%, 81%, 82%, 83%, 84%, 85%, 86%, 87%, 88%, 89%, 90%, 91%, 92%, 93%, 94%, 95%, 96%, 97%, 98%, 99% or greater sequence identity compared to SEQ ID NO: 1, SEQ ID NO: 3, SEQ ID NO: 5, SEQ ID NO: 7, SEQ ID NO: 9, SEQ ID NO: 11, SEQ ID NO: 13, SEQ ID NO: 15, SEQ ID NO: 17, SEQ ID NO: 19, SEQ ID NO: 22, SEQ ID NO: 24 or SEQ ID NO: 26. The term “about” when used herein in context with percent sequence identity means +/−0.5%. One of skill in the art will recognize that these values can be appropriately adjusted to determine corresponding homology of proteins considering amino acid similarity and the like. In some embodiments, the sequence identity is calculated using ClustalW algorithm in the ALIGNX® module of the Vector NTI® Program Suite (Invitrogen Corporation, Carlsbad, Calif.) with all default parameters. In some embodiments, the sequence identity is across the entire length of polypeptide calculated using ClustalW algorithm in the ALIGNX® module of the Vector NTI® Program Suite (Invitrogen Corporation, Carlsbad, Calif.) with all default parameters.

[0023] In some embodiments an IPD092-1 polypeptide comprises an amino acid sequence having at least about 70%, 71%, 72%, 73%, 74%, 75%, 76%, 77%, 78%, 79%, 80%, 81%, 82%, 83%, 84%, 85%, 86%, 87%, 88%, 89%, 90%, 91%, 92%, 93%, 94%, 95%, 96%, 97%, 98%, 99% or greater identity across the entire length of the amino acid sequence of SEQ ID NO: 1, SEQ ID NO: 3, SEQ ID NO: 5, SEQ ID NO: 7, SEQ ID NO: 9, SEQ ID NO: 11, SEQ ID NO: 13, SEQ ID NO: 15, SEQ ID NO: 17, SEQ ID NO: 19, SEQ ID NO: 22, SEQ ID NO: 24 or SEQ ID NO: 26.

[0024] In some embodiments, the sequence identity is across the entire length of the polypeptide calculated using ClustalW algorithm in the ALIGNX® module of the Vector NTI® Program Suite (Invitrogen Corporation, Carlsbad, Calif.) with all default parameters.

[0025] In some embodiments an IPD092-1 polypeptide comprises an amino acid sequence of SEQ ID NO: 1, SEQ ID NO: 3, SEQ ID NO: 5, SEQ ID NO: 7, SEQ ID NO: 9, SEQ ID NO: 11, SEQ ID NO: 13, SEQ ID NO: 15, SEQ ID NO: 17, SEQ ID NO: 19, SEQ ID NO: 22, SEQ ID NO: 24 or SEQ ID NO: 26 having 1, 2, 3, 4, 5, 6, 7, 8, 9, 10 11, 12, 13, 14, 15, 16, 17, 18, 19, 20, 21, 22, 23, 24, 25, 26, 27, 28, 29, 30, 31, 32, 33, 34, 35, 36, 37, 38, 39, 40, 41, 42, 43, 44, 45, 46, 47, 48, 49, 50, 51, 52, 53, 54, 55, 56, 57, 58, 59, 60, 61, 62, 63, 64, 65, 66, 67, 68, 69, 70,71, 72, 73, 74, 75, 76, 77, 78, 79, 80, 81, 82, 83, 84, 85, 86, 87, 88, 89, 90, 91, 92, 93, 94, 95 or more amino acid substitutions compared to the native amino acid at the corresponding position of SEQ ID NO: 1, SEQ ID NO: 3, SEQ ID NO: 5, SEQ ID NO: 7, SEQ ID NO: 9, SEQ ID NO: 11, SEQ ID NO: 13, SEQ ID NO: 15, SEQ ID NO: 17, SEQ ID NO: 19, SEQ ID NO: 22, SEQ ID NO: 24 or SEQ ID NO: 26.

[0026] In some embodiments, the IPD092-1 polypeptide comprises the amino acid sequence of SEQ ID NO: 1, SEQ ID NO: 3, SEQ ID NO: 5, SEQ ID NO: 7, SEQ ID NO: 9, SEQ ID NO: 11, SEQ ID NO: 13, SEQ ID NO: 15, SEQ ID NO: 17, SEQ ID NO: 19, SEQ ID NO: 22, SEQ ID NO: 24 or SEQ ID NO: 26.

[0027] “IPD092-2 polypeptide”, and “IPD092-2 protein” as used herein interchangeably refers to a polypeptide having insecticidal activity, in combination with a IPD092-1 polypeptide, against one or more insect pests of the Lepidoptera and/or Coleoptera orders including but not limited to Western corn rootworm (WCRW), and is sufficiently homologous to the IPD092-2 polypeptide of SEQ ID NO: 2. A variety of IPD092-2 polypeptide homologs are contemplated. Sources of IPD092-2 polypeptide homologs or related proteins include bacterial species selected from but not limited to Pseudomonas species, Chromobacterium species, Burkholderia species, and Woodsholea species. Alignment of the amino acid sequences of IPD092-2 polypeptide homologs (for example—FIG. 2A-2B), allows for the identification of residues that are highly conserved amongst the natural homologs of this family.

[0028] In some embodiments, the sequence homology is against the full-length sequence of an

[0029] IPD092-2 polypeptide. In some embodiments, the IPD092-2 polypeptide has at least about 40%, 45%, 50%, 51%, 52%, 53%, 54%, 55%, 56%, 57%, 58%, 59%, 60%, 61%, 62%, 63%, 64%, 65%, 66%, 67%, 68%, 69%, 70%, 71%, 72%, 73%, 74%, 75%, 76%, 77%, 78%, 79%, 80%, 81%, 82%, 83%, 84%, 85%, 86%, 87%, 88%, 89%, 90%, 91%, 92%, 93%, 94%, 95%, 96%, 97%, 98%, 99% or greater sequence identity compared to SEQ ID NO: 2, SEQ ID NO: 4, SEQ ID NO: 6, SEQ ID NO: 8, SEQ ID NO: 10, SEQ ID NO: 12, SEQ ID NO: 14, SEQ ID NO: 16, SEQ ID NO: 18, SEQ ID NO: 20, SEQ ID NO: 21, SEQ ID NO: 23 or SEQ ID NO: 25.

[0030] In some embodiments an IPD092-2 polypeptide comprises an amino acid sequence having at least about 70%, 71%, 72%, 73%, 74%, 75%, 76%, 77%, 78%, 79%, 80%, 81%, 82%, 83%, 84%, 85%, 86%, 87%, 88%, 89%, 90%, 91%, 92%, 93%, 94%, 95%, 96%, 97%, 98%, 99% or greater identity across the entire length of the amino acid sequence of SEQ ID NO: 2, SEQ ID NO: 4, SEQ ID NO: 6, SEQ ID NO: 8, SEQ ID NO: 10, SEQ ID NO: 12, SEQ ID NO: 14, SEQ ID NO: 16, SEQ ID NO: 18, SEQ ID NO: 20, SEQ ID NO: 21, SEQ ID NO: 23 or SEQ ID NO: 25.

[0031] In some embodiments an IPD092-2 polypeptide comprises an amino acid sequence of SEQ ID NO: 2, SEQ ID NO: 4, SEQ ID NO: 6, SEQ ID NO: 8, SEQ ID NO: 10, SEQ ID NO: 12, SEQ ID NO: 14, SEQ ID NO: 16, SEQ ID NO: 18, SEQ ID NO: 20, SEQ ID NO: 21, SEQ ID NO: 23 or SEQ ID NO: 25 having 1, 2, 3, 4, 5, 6, 7, 8, 9, 10 11, 12, 13, 14, 15, 16, 17, 18, 19, 20, 21, 22, 23, 24, 25, 26, 27, 28, 29, 30, 31, 32, 33, 34, 35, 36, 37, 38, 39, 40, 41, 42, 43, 44, 45, 46, 47, 48, 49, 50, 51, 52, 53, 54, 55, 56, 57, 58, 59, 60, 61, 62, 63, 64, 65, 66, 67, 68, 69, 70 or more amino acid substitutions compared to the native amino acid at the corresponding position of SEQ ID NO: 2, SEQ ID NO: 4, SEQ ID NO: 6, SEQ ID NO: 8, SEQ ID NO: 10, SEQ ID NO: 12, SEQ ID NO: 14, SEQ ID NO: 16, SEQ ID NO: 18, SEQ ID NO: 20, SEQ ID NO: 21, SEQ ID NO: 23 or SEQ ID NO: 25.

[0032] In some embodiments, the IPD092-2 polypeptide comprises the amino acid sequence of SEQ ID NO: 2, SEQ ID NO: 4, SEQ ID NO: 6, SEQ ID NO: 8, SEQ ID NO: 10, SEQ ID NO: 12, SEQ ID NO: 14, SEQ ID NO: 16, SEQ ID NO: 18, SEQ ID NO: 20, SEQ ID NO: 21, SEQ ID NO: 23 or SEQ ID NO: 25.

### IPD095-1 and IPD095-2 Proteins and Variants and Fragments Thereof

[0033] IPD095-1 and IPD095-2 polypeptides are encompassed by the disclosure. “IPD095-1 polypeptide”, and “IPD095-1 protein” as used herein interchangeably refers to a polypeptide having insecticidal activity, in combination with a IPD095-2 polypeptide, against one or more insect pests of the Lepidoptera and/or Coleoptera orders including but not limited to Western corn rootworm (WCRVV), and is sufficiently homologous to the IPD095-1 polypeptide of SEQ ID NO: 27. A variety of IPD095-1 polypeptide homologs are contemplated. Sources of IPD095-1 polypeptide homologs or related proteins include bacterial species selected from but not limited to Serratia species, Leminorella species, Dickeya species, Enterobacter species, Erwinia species, Yersinia species, and Rahnella species. Alignment of the amino acid sequences of IPD095-1 polypeptide homologs allows for the identification of residues that are highly conserved amongst the natural homologs of this family. IPD095-1 homologs can be aligned in a similar manner as shown in FIGS. 1 and 2 for IPD092-1 and IPD092-2 homologs to identify conserved amino acid positions, positions tolerant to change, motifs, and domains.

[0034] In some embodiments, the IPD095-1 polypeptide has at least about 40%, 45%, 50%, 51%, 52%, 53%, 54%, 55%, 56%, 57%, 58%, 59%, 60%, 61%, 62%, 63%, 64%, 65%, 66%, 67%, 68%, 69%, 70%, 71%, 72%, 73%, 74%, 75%, 76%, 77%, 78%, 79%, 80%, 81%, 82%, 83%, 84%, 85%, 86%, 87%, 88%, 89%, 90%, 91%, 92%, 93%, 94%, 95%, 96%, 97%, 98%, 99% or greater sequence identity compared to SEQ ID NO: 27, SEQ ID NO: 29, SEQ ID NO: 30, SEQ ID NO: 31, SEQ ID NO: 32, SEQ ID NO: 33, SEQ ID NO: 34, SEQ ID NO: 35, SEQ ID NO: 36, SEQ ID NO: 37, SEQ ID NO: 38, SEQ ID NO: 39, SEQ ID NO: 40, SEQ ID NO: 41, SEQ ID NO: 42, SEQ ID NO: 43, SEQ ID NO: 44, SEQ ID NO: 45, SEQ ID NO: 46, SEQ ID NO: 47, SEQ ID NO: 48, SEQ ID NO: 49, SEQ ID NO: 50, SEQ ID NO: 51, SEQ ID NO: 52, SEQ ID NO: 53, SEQ ID NO: 54, SEQ ID NO: 55, SEQ ID NO: 56, SEQ ID NO: 57 or SEQ ID NO: 58.

[0035] In some embodiments, the sequence homology is against the full-length sequence of an IPD095-1 polypeptide. In some embodiments an IPD095-1 polypeptide comprises an amino acid sequence having at least about 70%, 71%, 72%, 73%, 74%, 75%, 76%, 77%, 78%, 79%, 80%, 81%, 82%, 83%, 84%, 85%, 86%, 87%, 88%, 89%, 90%, 91%, 92%, 93%, 94%, 95%, 96%, 97%, 98%, 99% or greater identity across the entire length of the amino acid sequence of SEQ ID NO: 27, SEQ ID NO: 29, SEQ ID NO: 30, SEQ ID NO: 31, SEQ ID NO: 32, SEQ ID NO: 33, SEQ ID NO: 34, SEQ ID NO: 35, SEQ ID NO: 36, SEQ ID NO: 37, SEQ ID NO: 38, SEQ ID NO: 39, SEQ ID NO: 40, SEQ ID NO: 41, SEQ ID NO: 42, SEQ ID NO: 43, SEQ ID NO: 44, SEQ ID NO: 45, SEQ ID NO: 46, SEQ ID NO: 47, SEQ ID NO: 48, SEQ ID NO: 49, SEQ ID NO: 50, SEQ ID NO: 51, SEQ ID NO: 52, SEQ ID NO: 53, SEQ ID NO: 54, SEQ ID NO: 55, SEQ ID NO: 56, SEQ ID NO: 57 or SEQ ID NO: 58.

[0036] In some embodiments an IPD095-1 polypeptide comprises an amino acid sequence having at least 95%, 95.5% 96%, 96.5%, 97%, 97%.5%, 98%, 98.1%, 98.2%, 98.3%, 98.4%, 98.5%, 98.6%, 98.7%, 98.8%, 98.9%, 99%, 99.1%, 99.2%, 99.3%, 99.4%, 99.5%, 99.6%, 99.7%, 99.8%, 99.9% or greater identity across the entire length of the amino acid sequence of SEQ ID NO: 27, SEQ ID NO: 29, SEQ ID NO: 30, SEQ ID NO: 34, SEQ ID NO: 35, SEQ ID NO: 38, SEQ ID NO: 41, SEQ ID NO: 42, SEQ ID NO: 43, SEQ ID NO: 48, SEQ ID NO: 49, SEQ ID NO: 50, SEQ ID NO: 51, SEQ ID NO: 54, SEQ ID NO: 56 or SEQ ID NO: 57.

[0037] In some embodiments an IPD095-1 polypeptide comprises an amino acid sequence of

[0038] SEQ ID NO: 27, SEQ ID NO: 29, SEQ ID NO: 30, SEQ ID NO: 31, SEQ ID NO: 32, SEQ ID NO: 33, SEQ ID NO: 34, SEQ ID NO: 35, SEQ ID NO: 36, SEQ ID NO: 37, SEQ ID NO: 38, SEQ ID NO: 39, SEQ ID NO: 40, SEQ ID NO: 41, SEQ ID NO: 42, SEQ ID NO: 43, SEQ ID NO: 44, SEQ ID NO: 45, SEQ ID NO: 46, SEQ ID NO: 47, SEQ ID NO: 48, SEQ ID NO: 49, SEQ ID NO: 50, SEQ ID NO: 51, SEQ ID NO: 52, SEQ ID NO: 53, SEQ ID NO: 54, SEQ ID NO: 55, SEQ ID NO: 56, SEQ ID NO: 57 or SEQ ID NO: 58 having 1, 2, 3, 4, 5, 6, 7, 8, 9, 10 11, 12, 13, 14, 15, 16, 17, 18, 19, 20, 21, 22, 23, 24, 25, 26, 27, 28, 29, 30, 31, 32, 33, 34, 35, 36, 37, 38, 39, 40, 41, 42, 43, 44, 45, 46, 47, 48, 49, 50, 51, 52, 53, 54, 55, 56, 57, 58, 59, 60, 61, 62, 63, 64, 65, 66, 67, 68, 69, 70, 71, 72, 73, 74, 75, 76, 77, 78, 79, 80, 81, 82, 83, 84, 85 or more amino acid substitutions compared to the native amino acid at the corresponding position of SEQ ID NO: 27, SEQ ID NO: 29, SEQ ID NO: 30, SEQ ID NO: 31, SEQ ID NO: 32, SEQ ID NO: 33, SEQ ID NO: 34, SEQ ID NO: 35, SEQ ID NO: 36, SEQ ID NO: 37, SEQ ID NO: 38, SEQ ID NO: 39, SEQ ID NO: 40, SEQ ID NO: 41, SEQ ID NO: 42, SEQ ID NO: 43, SEQ ID NO: 44, SEQ ID NO: 45, SEQ ID NO: 46, SEQ ID NO: 47, SEQ ID NO: 48, SEQ ID NO: 49, SEQ ID NO: 50, SEQ ID NO: 51, SEQ ID NO: 52, SEQ ID NO: 53, SEQ ID NO: 54, SEQ ID NO: 55, SEQ ID NO: 56, SEQ ID NO: 57 or SEQ ID NO: 58.

[0039] In some embodiments, the IPD095-1 polypeptide comprises the amino acid sequence of SEQ ID NO: 27, SEQ ID NO: 29, SEQ ID NO: 30, SEQ ID NO: 31, SEQ ID NO: 32, SEQ ID NO: 33, SEQ ID NO: 34, SEQ ID NO: 35, SEQ ID NO: 36, SEQ ID NO: 37, SEQ ID NO: 38, SEQ ID NO: 39, SEQ ID NO: 40, SEQ ID NO: 41, SEQ ID NO: 42, SEQ ID NO: 43, SEQ ID NO: 44, SEQ ID NO: 45, SEQ ID NO: 46, SEQ ID NO: 47, SEQ ID NO: 48, SEQ ID NO: 49, SEQ ID NO: 50, SEQ ID NO: 51, SEQ ID NO: 52, SEQ ID NO: 53, SEQ ID NO: 54, SEQ ID NO: 55, SEQ ID NO: 56, SEQ ID NO: 57 or SEQ ID NO: 58.

[0040] In some embodiments, the IPD095-1 polypeptide comprises the amino acid sequence of SEQ ID NO: 27, SEQ ID NO: 29, SEQ ID NO: 30, SEQ ID NO: 34, SEQ ID NO: 35, SEQ ID NO: 38, SEQ ID NO: 41, SEQ ID NO: 42, SEQ ID NO: 43, SEQ ID NO: 48, SEQ ID NO: 49, SEQ ID NO: 50, SEQ ID NO: 51, SEQ ID NO: 54, SEQ ID NO: 56 or SEQ ID NO: 57.

[0041] “IPD095-2 polypeptide”, and “IPD095-2 protein” as used herein interchangeably refers to a polypeptide having insecticidal activity, in combination with a IPD095-1 polypeptide, against one or more insect pests of the Lepidoptera and/or Coleoptera orders including but not limited to Western corn rootworm (WCRW), and is sufficiently homologous to the IPD095-2 polypeptide of SEQ ID NO: 28. A variety of IPD095-2 polypeptide homologs are contemplated. Sources of IPD095-2 polypeptide homologs or related proteins include bacterial species selected from but not limited to Serratia species, Leminorella species, Dickeya species, Enterobacter species, Erwinia species, Yersinia species, and Rahnella species. Alignment of the amino acid sequences of IPD095-2 polypeptide homologs allows for the identification of residues that are highly conserved amongst the natural homologs of this family. IPD095-2 homologs can be aligned in a similar manner as shown in FIGS. 1 and 2 for IPD092-1 and IPD092-2 homologs to identify conserved amino acid positions, positions tolerant to change, motifs, and domains.

[0042] In some embodiments, the sequence homology is against the full-length sequence of an IPD095-2 polypeptide. In some embodiments, the IPD095-2 polypeptide has at least about 40%, 45%, 50%, 51%, 52%, 53%, 54%, 55%, 56%, 57%, 58%, 59%, 60%, 61%, 62%, 63%, 64%, 65%, 66%, 67%, 68%, 69%, 70%, 71%, 72%, 73%, 74%, 75%, 76%, 77%, 78%, 79%, 80%, 81%, 82%, 83%, 84%, 85%, 86%, 87%, 88%, 89%, 90%, 91%, 92%, 93%, 94%, 95%, 96%, 97%, 98%, 99% or greater sequence identity compared to SEQ ID NO: 28, SEQ ID NO: 59, SEQ ID NO: 60, SEQ ID NO: 61, SEQ ID NO: 62, SEQ ID NO: 63, SEQ ID NO: 64, SEQ ID NO: 65, SEQ ID NO: 66, SEQ ID NO: 67, SEQ ID NO: 68, SEQ ID NO: 69, SEQ ID NO: 70, SEQ ID NO: 71, SEQ ID NO: 72, SEQ ID NO: 73, SEQ ID NO: 74, SEQ ID NO: 75, SEQ ID NO: 76, SEQ ID NO: 77, SEQ ID NO: 78, SEQ ID NO: 79, SEQ ID NO: 80, SEQ ID NO: 81, SEQ ID NO: 82, SEQ ID NO: 83, SEQ ID NO: 84, SEQ ID NO: 85, SEQ ID NO: 86, SEQ ID NO: 87, SEQ ID NO: 88, SEQ ID NO: 89, SEQ ID NO: 90, SEQ ID NO: 91, SEQ ID NO: 92, SEQ ID NO: 93, SEQ ID NO: 94, SEQ ID NO: 95, SEQ ID NO: 96, SEQ ID NO: 97, SEQ ID NO: 98, SEQ ID NO: 99, SEQ ID NO: 100, SEQ ID NO: 101, SEQ ID NO: 102, SEQ ID NO: 103, SEQ ID NO: 104, SEQ ID NO: 105, SEQ ID NO: 106, SEQ ID NO: 107, SEQ ID NO: 108, SEQ ID NO: 109, SEQ ID NO: 110, SEQ ID NO: 111, SEQ ID NO: 112, SEQ ID NO: 113, SEQ ID NO: 114, SEQ ID NO: 115, SEQ ID NO: 116, SEQ ID NO: 117, SEQ ID NO: 118, SEQ ID NO: 119 or SEQ ID NO: 120.

[0043] In some embodiments an IPD095-2 polypeptide comprises an amino acid sequence having at least about 70%, 71%, 72%, 73%, 74%, 75%, 76%, 77%, 78%, 79%, 80%, 81%, 82%, 83%, 84%, 85%, 86%, 87%, 88%, 89%, 90%, 91%, 92%, 93%, 94%, 95%, 96%, 97%, 98%, 99% or greater identity across the entire length of the amino acid sequence of SEQ ID NO: 28, SEQ ID NO: 59, SEQ ID NO: 60, SEQ ID NO: 61, SEQ ID NO: 62, SEQ ID NO: 63, SEQ ID NO: 64, SEQ ID NO: 65, SEQ ID NO: 66, SEQ ID NO: 67, SEQ ID NO: 68, SEQ ID NO: 69, SEQ ID NO: 70, SEQ ID NO: 71, SEQ ID NO: 72, SEQ ID NO: 73, SEQ ID NO: 74, SEQ ID NO: 75, SEQ ID NO: 76, SEQ ID NO: 77, SEQ ID NO: 78, SEQ ID NO: 79, SEQ ID NO: 80, SEQ ID NO: 81, SEQ ID NO: 82, SEQ ID NO: 83, SEQ ID NO: 84, SEQ ID NO: 85, SEQ ID NO: 86, SEQ ID NO: 87, SEQ ID NO: 88, SEQ ID NO: 89, SEQ ID NO: 90, SEQ ID NO: 91, SEQ ID NO: 92, SEQ ID NO: 93, SEQ ID NO: 94, SEQ ID NO: 95, SEQ ID NO: 96, SEQ ID NO: 97, SEQ ID NO: 98, SEQ ID NO: 99, SEQ ID NO: 100, SEQ ID NO: 101, SEQ ID NO: 102, SEQ ID NO: 103, SEQ ID NO: 104, SEQ ID NO: 105, SEQ ID NO: 106, SEQ ID NO: 107, SEQ ID NO: 108, SEQ ID NO: 109, SEQ ID NO: 110, SEQ ID NO: 111, SEQ ID NO: 112, SEQ ID NO: 113, SEQ ID

[0044] NO: 114, SEQ ID NO: 115, SEQ ID NO: 116, SEQ ID NO: 117, SEQ ID NO: 118, SEQ ID NO: 119 or SEQ ID NO: 120.

[0045] In some embodiments an IPD095-2 polypeptide comprises an amino acid sequence having at least 95%, 95.5% 96%, 96.5%, 97%, 97%.5%, 98%, 98.1%, 98.2%, 98.3%, 98.4%, 98.5%, 98.6%, 98.7%, 98.8%, 98.9%, 99%, 99.1%, 99.2%, 99.3%, 99.4%, 99.5%, 99.6%, 99.7%, 99.8%, 99.9% or greater identity across the entire length of the amino acid sequence of SEQ ID NO: 28, SEQ ID NO: 59, SEQ ID NO: 60, SEQ ID NO: 61, SEQ ID NO: 63, SEQ ID NO: 66, SEQ ID NO: 67, SEQ ID NO: 68, SEQ ID NO: 75, SEQ ID NO: 77, SEQ ID NO: 78, SEQ ID NO: 79, SEQ ID NO: 82, SEQ ID NO: 83, SEQ ID NO: 84, SEQ ID NO: 85, SEQ ID NO: 86, SEQ ID NO: 94, SEQ ID NO: 95, SEQ ID NO: 96, SEQ ID NO: 97, SEQ ID NO: 99, SEQ ID NO: 100, SEQ ID NO: 103, SEQ ID NO: 107, SEQ ID NO: 119 or SEQ ID NO: 120.

[0046] In some embodiments an IPD095-2 polypeptide comprises an amino acid sequence of SEQ ID NO: 28, SEQ ID NO: 59, SEQ ID NO: 60, SEQ ID NO: 61, SEQ ID NO: 62, SEQ ID NO: 63, SEQ ID NO: 64, SEQ ID NO: 65, SEQ ID NO: 66, SEQ ID NO: 67, SEQ ID NO: 68, SEQ ID NO: 69, SEQ ID NO: 70, SEQ ID NO: 71, SEQ ID NO: 72, SEQ ID NO: 73, SEQ ID NO: 74, SEQ ID NO: 75, SEQ ID NO: 76, SEQ ID NO: 77, SEQ ID NO: 78, SEQ ID NO: 79, SEQ ID NO: 80, SEQ ID NO: 81, SEQ ID NO: 82, SEQ ID NO: 83, SEQ ID NO: 84, SEQ ID NO: 85, SEQ ID NO: 86, SEQ ID NO: 87, SEQ ID NO: 88, SEQ ID NO: 89, SEQ ID NO: 90, SEQ ID NO: 91, SEQ ID NO: 92, SEQ ID NO: 93, SEQ ID NO: 94, SEQ ID NO: 95, SEQ ID NO: 96, SEQ ID NO: 97, SEQ ID NO: 98, SEQ ID NO: 99, SEQ ID NO: 100, SEQ ID NO: 101, SEQ ID NO: 102, SEQ ID NO: 103, SEQ ID NO: 104, SEQ ID NO: 105, SEQ ID NO: 106, SEQ ID NO: 107, SEQ ID NO: 108, SEQ ID NO: 109, SEQ ID NO: 110, SEQ ID NO: 111, SEQ ID NO: 112, SEQ ID NO: 113, SEQ ID NO: 114, SEQ ID NO: 115, SEQ ID NO: 116, SEQ ID NO: 117, SEQ ID NO: 118, SEQ ID NO: 119 or SEQ ID NO: 120 having 1, 2, 3, 4, 5, 6, 7, 8, 9, 10 11, 12, 13, 14, 15, 16, 17, 18, 19, 20, 21, 22, 23, 24, 25, 26, 27, 28, 29, 30, 31, 32, 33, 34, 35, 36, 37, 38, 39, 40, 41, 42, 43, 44, 45, 46, 47, 48, 49, 50, 51, 52, 53, 54, 55, 56, 57, 58, 59, 60, 61, 62, 63, 64, 65, 66, 67, 68, 69, 70, 71, 72, 73, 74, 75, 76, 77, 78, 78, 79, 80, 81, 82, 83, 84, 85 or more amino acid substitutions compared to the native amino acid at the corresponding position of SEQ ID NO: 28, SEQ ID NO: 59, SEQ ID NO: 60, SEQ ID NO: 61, SEQ ID NO: 62, SEQ ID NO: 63, SEQ ID NO: 64, SEQ ID NO: 65, SEQ ID NO: 66, SEQ ID NO: 67, SEQ ID NO: 68, SEQ ID NO: 69, SEQ ID NO: 70, SEQ ID NO: 71, SEQ ID NO: 72, SEQ ID NO: 73, SEQ ID NO: 74, SEQ ID NO: 75, SEQ ID NO: 76, SEQ ID NO: 77, SEQ ID NO: 78, SEQ ID NO: 79, SEQ ID NO: 80, SEQ ID NO: 81, SEQ ID NO: 82, SEQ ID NO: 83, SEQ ID NO: 84, SEQ ID NO: 85, SEQ ID NO: 86, SEQ ID NO: 87, SEQ ID NO: 88, SEQ ID NO: 89, SEQ ID NO: 90, SEQ ID NO: 91, SEQ ID NO: 92, SEQ ID NO: 93, SEQ ID NO: 94, SEQ ID NO: 95, SEQ ID NO: 96, SEQ ID NO: 97, SEQ ID NO: 98, SEQ ID NO: 99, SEQ ID NO: 100, SEQ ID NO: 101, SEQ ID NO: 102, SEQ ID NO: 103, SEQ ID NO: 104, SEQ ID NO: 105, SEQ ID NO: 106, SEQ ID NO: 107, SEQ ID NO: 108, SEQ ID NO: 109, SEQ ID NO: 110, SEQ ID NO: 111, SEQ ID NO: 112, SEQ ID NO: 113, SEQ ID NO: 114, SEQ ID NO: 115, SEQ ID NO: 116, SEQ ID NO: 117, SEQ ID NO: 118, SEQ ID NO: 119 or SEQ ID NO: 120.

[0047] In some embodiments, the IPD095-2 polypeptide comprises the amino acid sequence of SEQ ID NO: 28, SEQ ID NO: 59, SEQ ID NO: 60, SEQ ID NO: 61, SEQ ID NO: 62, SEQ ID NO: 63, SEQ ID NO: 64, SEQ ID NO: 65, SEQ ID NO: 66, SEQ ID NO: 67, SEQ ID NO: 68, SEQ ID NO: 69, SEQ ID NO: 70, SEQ ID NO: 71, SEQ ID NO: 72, SEQ ID NO: 73, SEQ ID NO: 74, SEQ ID NO: 75, SEQ ID NO: 76, SEQ ID NO: 77, SEQ ID NO: 78, SEQ ID NO: 79, SEQ ID NO: 80, SEQ ID NO: 81, SEQ ID NO: 82, SEQ ID NO: 83, SEQ ID NO: 84, SEQ ID NO: 85, SEQ ID NO: 86, SEQ ID NO: 87, SEQ ID NO: 88, SEQ ID NO: 89, SEQ ID NO: 90, SEQ ID NO: 91, SEQ ID NO: 92, SEQ ID NO: 93, SEQ ID NO: 94, SEQ ID NO: 95, SEQ ID NO: 96, SEQ ID NO: 97, SEQ ID NO: 98, SEQ ID NO: 99, SEQ ID NO: 100, SEQ ID NO: 101, SEQ ID NO: 102, SEQ ID NO: 103, SEQ ID NO: 104, SEQ ID NO: 105, SEQ ID NO: 106, SEQ ID NO: 107, SEQ ID NO: 108, SEQ ID NO: 109, SEQ ID NO: 110, SEQ ID NO: 111, SEQ ID NO: 112, SEQ ID NO: 113, SEQ ID NO: 114, SEQ ID NO: 115, SEQ ID NO: 116, SEQ ID NO: 117, SEQ ID NO: 118, SEQ ID NO: 119 or SEQ ID NO: 120.

[0048] In some embodiments, the IPD095-2 polypeptide comprises the amino acid sequence of SEQ ID NO: 28, SEQ ID NO: 59, SEQ ID NO: 60, SEQ ID NO: 61, SEQ ID NO: 63, SEQ ID NO: 66, SEQ ID NO: 67, SEQ ID NO: 68, SEQ ID NO: 75, SEQ ID NO: 77, SEQ ID NO: 78, SEQ ID NO: 79, SEQ ID NO: 82, SEQ ID NO: 83, SEQ ID NO: 84, SEQ ID NO: 85, SEQ ID NO: 86, SEQ ID NO: 94, SEQ ID NO: 95, SEQ ID NO: 96, SEQ ID NO: 97, SEQ ID NO: 99, SEQ ID NO: 100, SEQ ID NO: 103, SEQ ID NO: 107, SEQ ID NO: 119 or SEQ ID NO: 120.

### IPD097 Proteins and Variants and Fragments Thereof

[0049] IPD097 polypeptides are encompassed by the disclosure. “IPD097 polypeptide”, and “IPD097 protein” as used herein interchangeably refers to a polypeptide having insecticidal activity, against one or more insect pests of the Lepidoptera and/or Coleoptera orders including but not limited to Western corn rootworm (WCRW), and is sufficiently homologous to the IPD097 polypeptide of SEQ ID NO: 121. A variety of IPD097 polypeptide homologs are contemplated. Sources of IPD097 polypeptide homologs or related proteins include bacterial species selected from but not limited to Haemophilus species, Aeromonas species, and Clostridiales species. Alignment of the amino acid sequences of IPD097 polypeptide homologs allows for the identification of residues that are highly conserved amongst the natural homologs of this family. IPD097 homologs can be aligned in a similar manner as shown in FIGS. 1 and 2 for IPD092-1 and IPD092-2 homologs to identify conserved amino acid positions, positions tolerant to change, motifs, and domains.

[0050] In some embodiments, the sequence homology is against the full-length sequence of an IPD097 polypeptide. In some embodiments, the IPD097 polypeptide has at least about 40%, 45%, 50%, 51%, 52%, 53%, 54%, 55%, 56%, 57%, 58%, 59%, 60%, 61%, 62%, 63%, 64%, 65%, 66%, 67%, 68%, 69%, 70%, 71%, 72%, 73%, 74%, 75%, 76%, 77%, 78%, 79%, 80%, 81%, 82%, 83%, 84%, 85%, 86%, 87%, 88%, 89%, 90%, 91%, 92%, 93%, 94%, 95%, 96%, 97%, 98%, 99% or greater sequence identity compared to SEQ ID NO: 121, SEQ ID NO: 122, SEQ ID NO: 123, SEQ ID NO: 124, SEQ ID NO: 125, SEQ ID NO: 126, SEQ ID NO: 127, SEQ ID NO: 128, SEQ ID NO: 129, SEQ ID NO: 130, SEQ ID NO: 131, SEQ ID NO: 132, SEQ ID NO: 133, SEQ ID NO: 134 or SEQ ID NO: 135.

[0051] In some embodiments an IPD097 polypeptide comprises an amino acid sequence having at least about 70%, 71%, 72%, 73%, 74%, 75%, 76%, 77%, 78%, 79%, 80%, 81%, 82%, 83%, 84%, 85%, 86%, 87%, 88%, 89%, 90%, 91%, 92%, 93%, 94%, 95%, 96%, 97%, 98%, 99% or greater identity across the entire length of the amino acid sequence of SEQ ID NO: 121, SEQ ID NO: 122, SEQ ID NO: 123, SEQ ID NO: 124, SEQ ID NO: 125, SEQ ID NO: 126, SEQ ID NO: 127, SEQ ID NO: 128, SEQ ID NO: 129, SEQ ID NO: 130, SEQ ID NO: 131, SEQ ID NO: 132, SEQ ID NO: 133, SEQ ID NO: 134 or SEQ ID NO: 135.

[0052] In some embodiments an IPD097 polypeptide comprises an amino acid sequence having at least 95%, 95.5% 96%, 96.5%, 97%, 97%.5%, 98%, 98.1%, 98.2%, 98.3%, 98.4%, 98.5%, 98.6%, 98.7%, 98.8%, 98.9%, 99%, 99.1%, 99.2%, 99.3%, 99.4%, 99.5%, 99.6%, 99.7%, 99.8%, 99.9% or greater identity across the entire length of the amino acid sequence of SEQ ID NO: 121, SEQ ID NO: 123, SEQ ID NO: 127, SEQ ID NO: 128, SEQ ID NO: 129, SEQ ID NO: 131 or SEQ ID NO: 132.

[0053] In some embodiments an IPD097 polypeptide comprises an amino acid sequence of SEQ ID NO: 121, SEQ ID NO: 122, SEQ ID NO: 123, SEQ ID NO: 124, SEQ ID NO: 125, SEQ ID NO: 126, SEQ ID NO: 127, SEQ ID NO: 128, SEQ ID NO: 129, SEQ ID NO: 130, SEQ ID NO: 131, SEQ ID NO: 132, SEQ ID NO: 133, SEQ ID NO: 134 or SEQ ID NO: 135 having 1, 2, 3, 4, 5, 6, 7, 8, 9, 10 11, 12, 13, 14, 15, 16, 17, 18, 19, 20, 21, 22, 23, 24, 25, 26, 27, 28, 29, 30, 31, 32, 33, 34, 35, 36, 37, 38, 39, 40, 41, 42, 43, 44, 45, 46, 47, 48, 49, 50, 51, 52, 53, 54, 55, 56, 57, 58, 59, 60, 61, 62, 63, 64, 65, 66, 67, 68, 69, 70 or more amino acid substitutions compared to the native amino acid at the corresponding position of SEQ ID NO: 121, SEQ ID NO: 122, SEQ ID NO: 123, SEQ ID NO: 124, SEQ ID NO: 125, SEQ ID NO: 126, SEQ ID NO: 127, SEQ ID NO: 128, SEQ ID NO: 129, SEQ ID NO: 130, SEQ ID NO: 131, SEQ ID NO: 132, SEQ ID NO: 133, SEQ ID NO: 134 or SEQ ID NO: 135.

[0054] In some embodiments, the IPD097 polypeptide comprises the amino acid sequence of SEQ ID NO: 121, SEQ ID NO: 122, SEQ ID NO: 123, SEQ ID NO: 124, SEQ ID NO: 125, SEQ ID NO: 126, SEQ ID NO: 127, SEQ ID NO: 128, SEQ ID NO: 129, SEQ ID NO: 130, SEQ ID NO: 131, SEQ ID NO: 132, SEQ ID NO: 133, SEQ ID NO: 134 or SEQ ID NO: 135.

[0055] In some embodiments, the IPD097 polypeptide comprises the amino acid sequence of SEQ ID NO: 121, SEQ ID NO: 123, SEQ ID NO: 127, SEQ ID NO: 128, SEQ ID NO: 129, SEQ ID NO: 131 or SEQ ID NO: 132.

### IPD099-1, IPD099-2 and IPD099-3 Proteins and Variants and Fragments Thereof

[0056] IPD099-1, IPD099-2 and IPD099-3 polypeptides are encompassed by the disclosure. “IPD099-1 polypeptide”, and “IPD099-1 protein” as used herein interchangeably refers to a polypeptide having insecticidal activity, in combination with a IPD099-2 polypeptide and IPD099-3, against one or more insect pests of the Lepidoptera and/or Coleoptera orders including but not limited to Western corn rootworm (WCRW), and is sufficiently homologous to the IPD099-1 polypeptide of SEQ ID NO: 136. A variety of IPD099-1 polypeptide homologs are contemplated. Sources of IPD099-1 polypeptide homologs or related proteins include bacterial species selected from but not limited to Aeromonas species, Haemophilus species, Burkholderia species, Chromobacterium species, Erwinia species, Serratia species, Salinivibrio species, Aquimarina species, Janthinobacterium species, Tolypothrix species, Photobacterium species, Janthinobacterium species, Rhizobium species, Moritella species, Providencia species, Yersinia species and Vibrio species. Alignment of the amino acid sequences of IPD099-1 polypeptide homologs allows for the identification of residues that are highly conserved amongst the natural homologs of this family. IPD099-1 homologs can be aligned in a similar manner as shown in FIGS. 1 and 2 for IPD092-1 and IPD092-2 homologs to identify conserved amino acid positions, positions tolerant to change, motifs, and domains.

[0057] In some embodiments, the sequence homology is against the full-length sequence of an IPD099-1 polypeptide. In some embodiments, the IPD099-1 polypeptide has at least about 40%, 45%, 50%, 51%, 52%, 53%, 54%, 55%, 56%, 57%, 58%, 59%, 60%, 61%, 62%, 63%, 64%, 65%, 66%, 67%, 68%, 69%, 70%, 71%, 72%, 73%, 74%, 75%, 76%, 77%, 78%, 79%, 80%, 81%, 82%, 83%, 84%, 85%, 86%, 87%, 88%, 89%, 90%, 91%, 92%, 93%, 94%, 95%, 96%, 97%, 98%, 99% or greater sequence identity compared to SEQ ID NO: 136, SEQ ID NO: 139, SEQ ID NO: 140, SEQ ID NO: 141, SEQ ID NO: 142, SEQ ID NO: 143, SEQ ID NO: 144, SEQ ID NO: 145, SEQ ID NO: 146, SEQ ID NO: 147, SEQ ID NO: 148, SEQ ID NO: 149, SEQ ID NO: 150, SEQ ID NO: 151, SEQ ID NO: 152, SEQ ID NO: 153, SEQ ID NO: 154, SEQ ID NO: 155, SEQ ID NO: 156, SEQ ID NO: 157, SEQ ID NO: 158, SEQ ID NO: 159, SEQ ID NO: 160, SEQ ID NO: 161, SEQ ID NO: 162, SEQ ID NO: 163, SEQ ID NO: 164, SEQ ID NO: 165, SEQ ID NO: 166, SEQ ID NO: 167, SEQ ID NO: 168, SEQ ID NO: 169, SEQ ID NO: 170, SEQ ID NO: 171, SEQ ID NO: 172, SEQ ID NO: 173, SEQ ID NO: 174, SEQ ID NO: 175, SEQ ID NO: 176, SEQ ID NO: 177, SEQ ID NO: 178, SEQ ID NO: 179, SEQ ID NO: 180, SEQ ID NO: 181, SEQ ID NO: 182, SEQ ID NO: 183, SEQ ID NO: 184, SEQ ID NO: 185, SEQ ID NO: 186, SEQ ID NO: 187, SEQ ID NO: 188, SEQ ID NO: 189, SEQ ID NO: 190, SEQ ID NO: 191, SEQ ID NO: 192, SEQ ID NO: 193, SEQ ID NO: 194, SEQ ID NO: 195, SEQ ID NO: 196, SEQ ID NO: 197, SEQ ID NO: 198, SEQ ID NO: 199, SEQ ID NO: 200, SEQ ID NO: 201, SEQ ID NO: 202, SEQ ID NO: 203, SEQ ID NO: 204, SEQ ID NO: 205, SEQ ID NO: 206, SEQ ID NO: 207, SEQ ID NO: 208, SEQ ID NO: 209, SEQ ID NO: 210, SEQ ID NO: 211, SEQ ID NO: 212, SEQ ID NO: 213, SEQ ID NO: 214 or SEQ ID NO: 215.

[0058] In some embodiments an IPD099-1 polypeptide comprises an amino acid sequence having at least about 70%, 71%, 72%, 73%, 74%, 75%, 76%, 77%, 78%, 79%, 80%, 81%, 82%, 83%, 84%, 85%, 86%, 87%, 88%, 89%, 90%, 91%, 92%, 93%, 94%, 95%, 96%, 97%, 98%, 99% or greater identity across the entire length of the amino acid sequence of SEQ ID NO: 136, SEQ ID NO: 139, SEQ ID NO: 140, SEQ ID NO: 141, SEQ ID NO: 142, SEQ ID NO: 143, SEQ ID NO: 144, SEQ ID NO: 145, SEQ ID NO: 146, SEQ ID NO: 147, SEQ ID NO: 148, SEQ ID NO: 149, SEQ ID NO: 150, SEQ ID NO: 151, SEQ ID NO: 152, SEQ ID NO: 153, SEQ ID NO: 154, SEQ ID NO: 155, SEQ ID NO: 156, SEQ ID NO: 157, SEQ ID NO: 158, SEQ ID NO: 159, SEQ ID NO: 160, SEQ ID NO: 161, SEQ ID NO: 162, SEQ ID NO: 163, SEQ ID NO: 164, SEQ ID NO: 165, SEQ ID NO: 166, SEQ ID NO: 167, SEQ ID NO: 168, SEQ ID NO: 169, SEQ ID NO: 170, SEQ ID NO: 171, SEQ ID NO: 172, SEQ ID NO: 173, SEQ ID NO: 174, SEQ ID NO: 175, SEQ ID NO: 176, SEQ ID NO: 177, SEQ ID NO: 178, SEQ ID NO: 179, SEQ ID NO: 180, SEQ ID NO: 181, SEQ ID NO: 182, SEQ ID NO: 183, SEQ ID NO: 184, SEQ ID NO: 185, SEQ ID NO: 186, SEQ ID NO: 187, SEQ ID NO: 188, SEQ ID NO: 189, SEQ ID NO: 190, SEQ ID NO: 191, SEQ ID NO: 192, SEQ ID NO: 193, SEQ ID NO: 194, SEQ ID NO: 195, SEQ ID NO: 196, SEQ ID NO: 197, SEQ ID NO: 198, SEQ ID NO: 199, SEQ ID NO: 200, SEQ ID NO: 201, SEQ ID NO: 202, SEQ ID NO: 203, SEQ ID NO: 204, SEQ ID NO: 205, SEQ ID NO: 206, SEQ ID NO: 207, SEQ ID NO: 208, SEQ ID NO: 209, SEQ ID NO: 210, SEQ ID NO: 211, SEQ ID NO: 212, SEQ ID NO: 213, SEQ ID NO: 214 or SEQ ID NO: 215.

[0059] In some embodiments an IPD099-1 polypeptide comprises an amino acid sequence having at least 95%, 95.5% 96%, 96.5%, 97%, 97%.5%, 98%, 98.1%, 98.2%, 98.3%, 98.4%, 98.5%, 98.6%, 98.7%, 98.8%, 98.9%, 99%, 99.1%, 99.2%, 99.3%, 99.4%, 99.5%, 99.6%, 99.7%, 99.8%, 99.9% or greater identity across the entire length of the amino acid sequence of SEQ ID NO: 136, SEQ ID NO: 139, SEQ ID NO: 140, SEQ ID NO: 142, SEQ ID NO: 144, SEQ ID NO: 145, SEQ ID NO: 148, SEQ ID NO: 149, SEQ ID NO: 150, SEQ ID NO: 155, SEQ ID NO: 157, SEQ ID NO: 158, SEQ ID NO: 177, SEQ ID NO: 179, SEQ ID NO: 180, SEQ ID NO: 183, SEQ ID NO: 185, SEQ ID NO: 186, SEQ ID NO: 187, SEQ ID NO: 188, SEQ ID NO: 189, SEQ ID NO: 192, SEQ ID NO: 195, SEQ ID NO: 196, SEQ ID NO: 197, SEQ ID NO: 199, SEQ ID NO: 205, SEQ ID NO: 208, SEQ ID NO: 209, SEQ ID NO: 210 or SEQ ID NO: 215.

[0060] In some embodiments an IPD099-1 polypeptide comprises an amino acid sequence of SEQ ID NO: 136, SEQ ID NO: 139, SEQ ID NO: 140, SEQ ID NO: 141, SEQ ID NO: 142, SEQ ID NO: 143, SEQ ID NO: 144, SEQ ID NO: 145, SEQ ID NO: 146, SEQ ID NO: 147, SEQ ID NO: 148, SEQ ID NO: 149, SEQ ID NO: 150, SEQ ID NO: 151, SEQ ID NO: 152, SEQ ID NO: 153, SEQ ID NO: 154, SEQ ID NO: 155, SEQ ID NO: 156, SEQ ID NO: 157, SEQ ID NO: 158, SEQ ID NO: 159, SEQ ID NO: 160, SEQ ID NO: 161, SEQ ID NO: 162, SEQ ID NO: 163, SEQ ID NO: 164, SEQ ID NO: 165, SEQ ID NO: 166, SEQ ID NO: 167, SEQ ID NO: 168, SEQ ID NO: 169, SEQ ID NO: 170, SEQ ID NO: 171, SEQ ID NO: 172, SEQ ID NO: 173, SEQ ID NO: 174, SEQ ID NO: 175, SEQ ID NO: 176, SEQ ID NO: 177, SEQ ID NO: 178, SEQ ID NO: 179, SEQ ID NO: 180, SEQ ID NO: 181, SEQ ID NO: 182, SEQ ID NO: 183, SEQ ID NO: 184, SEQ ID NO: 185, SEQ ID NO: 186, SEQ ID NO: 187, SEQ ID NO: 188, SEQ ID NO: 189, SEQ ID NO: 190, SEQ ID NO: 191, SEQ ID NO: 192, SEQ ID NO: 193, SEQ ID NO: 194, SEQ ID NO: 195, SEQ ID NO: 196, SEQ ID NO: 197, SEQ ID NO: 198, SEQ ID NO: 199, SEQ ID NO: 200, SEQ ID NO: 201, SEQ ID NO: 202, SEQ ID NO: 203, SEQ ID NO: 204, SEQ ID NO: 205, SEQ ID NO: 206, SEQ ID NO: 207, SEQ ID NO: 208, SEQ ID NO: 209, SEQ ID NO: 210, SEQ ID NO: 211, SEQ ID NO: 212, SEQ ID NO: 213, SEQ ID NO: 214 or SEQ ID NO: 215 having 1, 2, 3, 4, 5, 6, 7, 8, 9, 10 11, 12, 13, 14, 15, 16, 17, 18, 19, 20, 21, 22, 23, 24, 25, 26, 27, 28, 29, 30, 31, 32, 33, 34, 35, 36, 37, 38, 39, 40, 41, 42, 43, 44, 45, 46, 47, 48, 49, 50, 51, 52, 53, 54, 55, 56, 57, 58, 59, 60, 61, 62, 63, 64, 65, 66, 67, 68, 69, 70 or more amino acid substitutions compared to the native amino acid at the corresponding position of SEQ ID NO: 136, SEQ ID NO: 139, SEQ ID NO: 140, SEQ ID NO: 141, SEQ ID NO: 142, SEQ ID NO: 143, SEQ ID NO: 144, SEQ ID NO: 145, SEQ ID NO: 146, SEQ ID NO: 147, SEQ ID NO: 148, SEQ ID NO: 149, SEQ ID NO: 150, SEQ ID NO: 151, SEQ ID NO: 152, SEQ ID NO: 153, SEQ ID NO: 154, SEQ ID NO: 155, SEQ ID NO: 156, SEQ ID NO: 157, SEQ ID NO: 158, SEQ ID NO: 159, SEQ ID NO: 160, SEQ ID NO: 161, SEQ ID NO: 162, SEQ ID NO: 163, SEQ ID NO: 164, SEQ ID NO: 165, SEQ ID NO: 166, SEQ ID NO: 167, SEQ ID NO: 168, SEQ ID NO: 169, SEQ ID NO: 170, SEQ ID NO: 171, SEQ ID NO: 172, SEQ ID NO: 173, SEQ ID NO: 174, SEQ ID NO: 175, SEQ ID NO: 176, SEQ ID NO: 177, SEQ ID NO: 178, SEQ ID NO: 179, SEQ ID NO: 180, SEQ ID NO: 181, SEQ ID NO: 182, SEQ ID NO: 183, SEQ ID NO: 184, SEQ ID NO: 185, SEQ ID NO: 186, SEQ ID NO: 187, SEQ ID NO: 188, SEQ ID NO: 189, SEQ ID NO: 190, SEQ ID NO: 191, SEQ ID NO: 192, SEQ ID NO: 193, SEQ ID NO: 194, SEQ ID NO: 195, SEQ ID NO: 196, SEQ ID NO: 197, SEQ ID NO: 198, SEQ ID NO: 199, SEQ ID NO: 200, SEQ ID NO: 201, SEQ ID NO: 202, SEQ ID NO: 203, SEQ ID NO: 204, SEQ ID NO: 205, SEQ ID NO: 206, SEQ ID NO: 207, SEQ ID NO: 208, SEQ ID NO: 209, SEQ ID NO: 210, SEQ ID NO: 211, SEQ ID NO: 212, SEQ ID NO: 213, SEQ ID NO: 214 or SEQ ID NO: 215.

[0061] In some embodiments, the IPD099-1 polypeptide comprises the amino acid sequence of SEQ ID NO: 136, SEQ ID NO: 139, SEQ ID NO: 140, SEQ ID NO: 141, SEQ ID NO: 142, SEQ ID NO: 143, SEQ ID NO: 144, SEQ ID NO: 145, SEQ ID NO: 146, SEQ ID NO: 147, SEQ ID NO: 148, SEQ ID NO: 149, SEQ ID NO: 150, SEQ ID NO: 151, SEQ ID NO: 152, SEQ ID NO: 153, SEQ ID NO: 154, SEQ ID NO: 155, SEQ ID NO: 156, SEQ ID NO: 157, SEQ ID NO: 158, SEQ ID NO: 159, SEQ ID NO: 160, SEQ ID NO: 161, SEQ ID NO: 162, SEQ ID NO: 163, SEQ ID NO: 164, SEQ ID NO: 165, SEQ ID NO: 166, SEQ ID NO: 167, SEQ ID NO: 168, SEQ ID NO: 169, SEQ ID NO: 170, SEQ ID NO: 171, SEQ ID NO: 172, SEQ ID NO: 173, SEQ ID NO: 174, SEQ ID NO: 175, SEQ ID NO: 176, SEQ ID NO: 177, SEQ ID NO: 178, SEQ ID NO: 179, SEQ ID NO: 180, SEQ ID NO: 181, SEQ ID NO: 182, SEQ ID NO: 183, SEQ ID NO: 184, SEQ ID NO: 185, SEQ ID NO: 186, SEQ ID NO: 187, SEQ ID NO: 188, SEQ ID NO: 189, SEQ ID NO: 190, SEQ ID NO: 191, SEQ ID NO: 192, SEQ ID NO: 193, SEQ ID NO: 194, SEQ ID NO: 195, SEQ ID NO: 196, SEQ ID NO: 197, SEQ ID NO: 198, SEQ ID NO: 199, SEQ ID NO: 200, SEQ ID NO: 201, SEQ ID NO: 202, SEQ ID NO: 203, SEQ ID NO: 204, SEQ ID NO: 205, SEQ ID NO: 206, SEQ ID NO: 207, SEQ ID NO: 208, SEQ ID NO: 209, SEQ ID NO: 210, SEQ ID NO: 211, SEQ ID NO: 212, SEQ ID NO: 213, SEQ ID NO: 214 or SEQ ID NO: 215.

[0062] In some embodiments, the IPD099-1 polypeptide comprises the amino acid sequence of SEQ ID NO: 136, SEQ ID NO: 139, SEQ ID NO: 140, SEQ ID NO: 142, SEQ ID NO: 144, SEQ ID NO: 145, SEQ ID NO: 148, SEQ ID NO: 149, SEQ ID NO: 150, SEQ ID NO: 155, SEQ ID NO: 157, SEQ ID NO: 158, SEQ ID NO: 177, SEQ ID NO: 179, SEQ ID NO: 180, SEQ ID NO: 183, SEQ ID NO: 185, SEQ ID NO: 186, SEQ ID NO: 187, SEQ ID NO: 188, SEQ ID NO: 189, SEQ ID NO: 192, SEQ ID NO: 195, SEQ ID NO: 196, SEQ ID NO: 197, SEQ ID NO: 199, SEQ ID NO: 205, SEQ ID NO: 208, SEQ ID NO: 209, SEQ ID NO: 210 or SEQ ID NO: 215.

[0063] “IPD099-2 polypeptide”, and “IPD099-2 protein” as used herein interchangeably refers to a polypeptide having insecticidal activity, against one or more insect pests of the Lepidoptera and/or Coleoptera orders including but not limited to Western corn rootworm (WCRW), and is sufficiently homologous to the IPD099-2 polypeptide of SEQ ID NO: 137. A variety of IPD099-2 polypeptide homologs are contemplated. Sources of IPD099-2 polypeptide homologs or related proteins include bacterial species selected from but not limited to Aeromonas species, Haemophilus species, Burkholderia species, Chromobacterium species, Erwinia species, Serratia species, Salinivibrio species, Aquimarina species, Janthinobacterium species, Tolypothrix species, Photobacterium species, Janthinobacterium species, Rhizobium species, Moritella species, Providencia species, Yersinia species and Vibrio species. Alignment of the amino acid sequences of IPD099-2 polypeptide homologs allows for the identification of residues that are highly conserved amongst the natural homologs of this family. IPD099-2 homologs can be aligned in a similar manner as shown in FIGS. 1 and 2 for IPD092-1 and IPD092-2 homologs to identify conserved amino acid positions, positions tolerant to change, motifs, and domains.

[0064] In some embodiments, the sequence homology is against the full-length sequence of an IPD099-2 polypeptide. In some embodiments, the IPD099-2 polypeptide has at least about 40%, 45%, 50%, 51%, 52%, 53%, 54%, 55%, 56%, 57%, 58%, 59%, 60%, 61%, 62%, 63%, 64%, 65%, 66%, 67%, 68%, 69%, 70%, 71%, 72%, 73%, 74%, 75%, 76%, 77%, 78%, 79%, 80%, 81%, 82%, 83%, 84%, 85%, 86%, 87%, 88%, 89%, 90%, 91%, 92%, 93%, 94%, 95%, 96%, 97%, 98%, 99% or greater sequence identity compared to SEQ ID NO: 137, SEQ ID NO: 216, SEQ ID NO: 217, SEQ ID NO: 218, SEQ ID NO: 219, SEQ ID NO: 220, SEQ ID NO: 221, SEQ ID NO: 222, SEQ ID NO: 223, SEQ ID NO: 224, SEQ ID NO: 225, SEQ ID NO: 226, SEQ ID NO: 227, SEQ ID NO: 228, SEQ ID NO: 229, SEQ ID NO: 230, SEQ ID NO: 231, SEQ ID NO: 232, SEQ ID NO: 233, SEQ ID NO: 234, SEQ ID NO: 235, SEQ ID NO: 236, SEQ ID NO: 237, SEQ ID NO: 238, SEQ ID NO: 239, SEQ ID NO: 240, SEQ ID NO: 241, SEQ ID NO: 242, SEQ ID NO: 243, SEQ ID NO: 244, SEQ ID NO: 245, SEQ ID NO: 246, SEQ ID NO: 247, SEQ ID NO: 248, SEQ ID NO: 249, SEQ ID NO: 250, SEQ ID NO: 251, SEQ ID NO: 252, SEQ ID NO: 253, SEQ ID NO: 254, SEQ ID NO: 255, SEQ ID NO: 256, SEQ ID NO: 257, SEQ ID NO: 258, SEQ ID NO: 259, SEQ ID NO: 260, SEQ ID NO: 261, SEQ ID NO: 262, SEQ ID NO: 263, SEQ ID NO: 264, SEQ ID NO: 265, SEQ ID NO: 266, SEQ ID NO: 267, SEQ ID NO: 268, SEQ ID NO: 269, SEQ ID NO: 270 or SEQ ID NO: 271.

[0065] In some embodiments an IPD099-2 polypeptide comprises an amino acid sequence having at least about 70%, 71%, 72%, 73%, 74%, 75%, 76%, 77%, 78%, 79%, 80%, 81%, 82%, 83%, 84%, 85%, 86%, 87%, 88%, 89%, 90%, 91%, 92%, 93%, 94%, 95%, 96%, 97%, 98%, 99% or greater identity across the entire length of the amino acid sequence of SEQ ID NO: 137, SEQ ID NO: 216, SEQ ID NO: 217, SEQ ID NO: 218, SEQ ID NO: 219, SEQ ID NO: 220, SEQ ID NO: 221, SEQ ID NO: 222, SEQ ID NO: 223, SEQ ID NO: 224, SEQ ID NO: 225, SEQ ID NO: 226, SEQ ID NO: 227, SEQ ID NO: 228, SEQ ID NO: 229, SEQ ID NO: 230, SEQ ID NO: 231, SEQ ID NO: 232, SEQ ID NO: 233, SEQ ID NO: 234, SEQ ID NO: 235, SEQ ID NO: 236, SEQ ID NO: 237, SEQ ID NO: 238, SEQ ID NO: 239, SEQ ID NO: 240, SEQ ID NO: 241, SEQ ID NO: 242, SEQ ID NO: 243, SEQ ID NO: 244, SEQ ID NO: 245, SEQ ID NO: 246, SEQ ID NO: 247, SEQ ID NO: 248, SEQ ID NO: 249, SEQ ID NO: 250, SEQ ID NO: 251, SEQ ID NO: 252, SEQ ID NO: 253, SEQ ID NO: 254, SEQ ID NO: 255, SEQ ID NO: 256, SEQ ID NO: 257, SEQ ID NO: 258, SEQ ID NO: 259, SEQ ID NO: 260, SEQ ID NO: 261, SEQ ID NO: 262, SEQ ID NO: 263, SEQ ID NO: 264, SEQ ID NO: 265, SEQ ID NO: 266, SEQ ID NO: 267, SEQ ID NO: 268, SEQ ID NO: 269, SEQ ID NO: 270 or SEQ ID NO: 271.

[0066] In some embodiments an IPD099-2 polypeptide comprises an amino acid sequence having at least 95%, 95.5% 96%, 96.5%, 97%, 97%.5%, 98%, 98.1%, 98.2%, 98.3%, 98.4%, 98.5%, 98.6%, 98.7%, 98.8%, 98.9%, 99%, 99.1%, 99.2%, 99.3%, 99.4%, 99.5%, 99.6%, 99.7%, 99.8%, 99.9% or greater identity across the entire length of the amino acid sequence of SEQ ID NO: 137, SEQ ID NO: 216, SEQ ID NO: 221, SEQ ID NO: 222, SEQ ID NO: 225, SEQ ID NO: 227, SEQ ID NO: 230, SEQ ID NO: 232, SEQ ID NO: 244, SEQ ID NO: 246, SEQ ID NO: 249, SEQ ID NO: 251, SEQ ID NO: 254, SEQ ID NO: 255, SEQ ID NO: 262, SEQ ID NO: 265, SEQ ID NO: 268 or SEQ ID NO: 269.

[0067] In some embodiments an IPD099-2 polypeptide comprises an amino acid sequence of SEQ ID NO: 137, SEQ ID NO: 216, SEQ ID NO: 217, SEQ ID NO: 218, SEQ ID NO: 219, SEQ ID NO: 220, SEQ ID NO: 221, SEQ ID NO: 222, SEQ ID NO: 223, SEQ ID NO: 224, SEQ ID NO: 225, SEQ ID NO: 226, SEQ ID NO: 227, SEQ ID NO: 228, SEQ ID NO: 229, SEQ ID NO: 230, SEQ ID NO: 231, SEQ ID NO: 232, SEQ ID NO: 233, SEQ ID NO: 234, SEQ ID NO: 235, SEQ ID NO: 236, SEQ ID NO: 237, SEQ ID NO: 238, SEQ ID NO: 239, SEQ ID NO: 240, SEQ ID NO: 241, SEQ ID NO: 242, SEQ ID NO: 243, SEQ ID NO: 244, SEQ ID NO: 245, SEQ ID NO: 246, SEQ ID NO: 247, SEQ ID NO: 248, SEQ ID NO: 249, SEQ ID NO: 250, SEQ ID NO: 251, SEQ ID NO: 252, SEQ ID NO: 253, SEQ ID NO: 254, SEQ ID NO: 255, SEQ ID NO: 256, SEQ ID NO: 257, SEQ ID NO: 258, SEQ ID NO: 259, SEQ ID NO: 260, SEQ ID NO: 261, SEQ ID NO: 262, SEQ ID NO: 263, SEQ ID NO: 264, SEQ ID NO: 265, SEQ ID NO: 266, SEQ ID NO: 267, SEQ ID NO: 268, SEQ ID NO: 269, SEQ ID NO: 270 or SEQ ID NO: 271 having 1, 2, 3, 4, 5, 6, 7, 8, 9, 10 11, 12, 13, 14, 15, 16, 17, 18, 19, 20, 21, 22, 23, 24, 25, 26, 27, 28, 29, 30, 31, 32, 33, 34, 35, 36, 37, 38, 39, 40, 41, 42, 43, 44, 45, 46, 47, 48, 49, 50, 51, 52, 53, 54, 55, 56, 57, 58, 59, 60, 61, 62, 63, 64, 65, 66, 67, 68, 69, 70 or more amino acid substitutions compared to the native amino acid at the corresponding position of SEQ ID NO: 137, SEQ ID NO: 216, SEQ ID NO: 217, SEQ ID NO: 218, SEQ ID NO: 219, SEQ ID NO: 220, SEQ ID NO: 221, SEQ ID NO: 222, SEQ ID NO: 223, SEQ ID NO: 224, SEQ ID NO: 225, SEQ ID NO: 226, SEQ ID NO: 227, SEQ ID NO: 228, SEQ ID NO: 229, SEQ ID NO: 230, SEQ ID NO: 231, SEQ ID NO: 232, SEQ ID NO: 233, SEQ ID NO: 234, SEQ ID NO: 235, SEQ ID NO: 236, SEQ ID NO: 237, SEQ ID NO: 238, SEQ ID NO: 239, SEQ ID NO: 240, SEQ ID NO: 241, SEQ ID NO: 242, SEQ ID NO: 243, SEQ ID NO: 244, SEQ ID NO: 245, SEQ ID NO: 246, SEQ ID NO: 247, SEQ ID NO: 248, SEQ ID NO: 249, SEQ ID NO: 250, SEQ ID NO: 251, SEQ ID NO: 252, SEQ ID NO: 253, SEQ ID NO: 254, SEQ ID NO: 255, SEQ ID NO: 256, SEQ ID NO: 257, SEQ ID NO: 258, SEQ ID NO: 259, SEQ ID NO: 260, SEQ ID NO: 261, SEQ ID NO: 262, SEQ ID NO: 263, SEQ ID NO: 264, SEQ ID NO: 265, SEQ ID NO: 266, SEQ ID NO: 267, SEQ ID NO: 268, SEQ ID NO: 269, SEQ ID NO: 270 or SEQ ID NO: 271.

[0068] In some embodiments, the IPD099-2 polypeptide comprises the amino acid sequence of SEQ ID NO: 137, SEQ ID NO: 216, SEQ ID NO: 217, SEQ ID NO: 218, SEQ ID NO: 219, SEQ ID NO: 220, SEQ ID NO: 221, SEQ ID NO: 222, SEQ ID NO: 223, SEQ ID NO: 224, SEQ ID NO: 225, SEQ ID NO: 226, SEQ ID NO: 227, SEQ ID NO: 228, SEQ ID NO: 229, SEQ ID NO: 230, SEQ ID NO: 231, SEQ ID NO: 232, SEQ ID NO: 233, SEQ ID NO: 234, SEQ ID NO: 235, SEQ ID NO: 236, SEQ ID NO: 237, SEQ ID NO: 238, SEQ ID NO: 239, SEQ ID NO: 240, SEQ ID NO: 241, SEQ ID NO: 242, SEQ ID NO: 243, SEQ ID NO: 244, SEQ ID NO: 245, SEQ ID NO: 246, SEQ ID NO: 247, SEQ ID NO: 248, SEQ ID NO: 249, SEQ ID NO: 250, SEQ ID NO: 251, SEQ ID NO: 252, SEQ ID NO: 253, SEQ ID NO: 254, SEQ ID NO: 255, SEQ ID NO: 256, SEQ ID NO: 257, SEQ ID NO: 258, SEQ ID NO: 259, SEQ ID NO: 260, SEQ ID NO: 261, SEQ ID NO: 262, SEQ ID NO: 263, SEQ ID NO: 264, SEQ ID NO: 265, SEQ ID NO: 266, SEQ ID NO: 267, SEQ ID NO: 268, SEQ ID NO: 269, SEQ ID NO: 270 or SEQ ID NO: 271.

[0069] In some embodiments, the IPD099-2 polypeptide comprises the amino acid sequence of SEQ ID NO: 137, SEQ ID NO: 216, SEQ ID NO: 221, SEQ ID NO: 222, SEQ ID NO: 225, SEQ ID NO: 227, SEQ ID NO: 230, SEQ ID NO: 232, SEQ ID NO: 244, SEQ ID NO: 246, SEQ ID NO: 249, SEQ ID NO: 251, SEQ ID NO: 254, SEQ ID NO: 255, SEQ ID NO: 262, SEQ ID NO: 265, SEQ ID NO: 268 or SEQ ID NO: 269.

[0070] “IPD099-3 polypeptide”, and “IPD099-3 protein” as used herein interchangeably refers to a polypeptide having insecticidal activity, in combination with an IPD099-1 polypeptide and an IPD099-2 polypeptide, against one or more insect pests of the Lepidoptera and/or Coleoptera orders including but not limited to Western corn rootworm (WCRW), and is sufficiently homologous to the IPD099-3 polypeptide of SEQ ID NO: 138. A variety of IPD099-3 polypeptide homologs are contemplated. Sources of IPD099-3 polypeptide homologs or related proteins include bacterial species selected from but not limited to Aeromonas species, Haemophilus species, Burkholderia species, Chromobacterium species, Erwinia species, Serratia species, Salinivibrio species, Aquimarina species, Janthinobacterium species, Tolypothrix species, Photobacterium species, Janthinobacterium species, Rhizobium species, Moritella species, Providencia species, Yersinia species and Vibrio species. Alignment of the amino acid sequences of IPD099-3 polypeptide homologs allows for the identification of residues that are highly conserved amongst the natural homologs of this family IPD099-3 homologs can be aligned in a similar manner as shown in FIGS. 1 and 2 for IPD092-1 and IPD092-2 homologs to identify conserved amino acid positions, positions tolerant to change, motifs, and domains.

[0071] In some embodiments, the sequence homology is against the full-length sequence of an IPD099-3 polypeptide. In some embodiments, the IPD099-3 polypeptide has at least about 40%, 45%, 50%, 51%, 52%, 53%, 54%, 55%, 56%, 57%, 58%, 59%, 60%, 61%, 62%, 63%, 64%, 65%, 66%, 67%, 68%, 69%, 70%, 71%, 72%, 73%, 74%, 75%, 76%, 77%, 78%, 79%, 80%, 81%, 82%, 83%, 84%, 85%, 86%, 87%, 88%, 89%, 90%, 91%, 92%, 93%, 94%, 95%, 96%, 97%, 98%, 99% or greater sequence identity compared to SEQ ID NO: 138, SEQ ID NO: 272, SEQ ID NO: 273, SEQ ID NO: 274, SEQ ID NO: 275, SEQ ID NO: 276, SEQ ID NO: 277, SEQ ID NO: 278, SEQ ID NO: 279, SEQ ID NO: 280, SEQ ID NO: 281, SEQ ID NO: 282, SEQ ID NO: 283, SEQ ID NO: 284, SEQ ID NO: 285, SEQ ID NO: 286, SEQ ID NO: 287, SEQ ID NO: 288, SEQ ID NO: 289, SEQ ID NO: 290, SEQ ID NO: 291, SEQ ID NO: 292, SEQ ID NO: 293, SEQ ID NO: 294, SEQ ID NO: 295, SEQ ID NO: 296, SEQ ID NO: 297, SEQ ID NO: 298, SEQ ID NO: 299, SEQ ID NO: 300, SEQ ID NO: 301, SEQ ID NO: 302, SEQ ID NO: 303, SEQ ID NO: 304, SEQ ID NO: 305, SEQ ID NO: 306, SEQ ID NO: 307, SEQ ID NO: 308, SEQ ID NO: 309, SEQ ID NO: 310, SEQ ID NO: 311, SEQ ID NO: 312, SEQ ID NO: 313, SEQ ID NO: 314, SEQ ID NO: 315, SEQ ID NO: 316, SEQ ID NO: 317, SEQ ID NO: 318, SEQ ID NO: 319, SEQ ID NO: 320, SEQ ID NO: 321, SEQ ID NO: 322, SEQ ID NO: 323, SEQ ID NO: 324, SEQ ID NO: 325, SEQ ID NO: 326, SEQ ID NO: 327, SEQ ID NO: 328, SEQ ID NO: 329, SEQ ID NO: 330 or SEQ ID NO: 331.

[0072] In some embodiments an IPD099-3 polypeptide comprises an amino acid sequence having at least about 70%, 71%, 72%, 73%, 74%, 75%, 76%, 77%, 78%, 79%, 80%, 81%, 82%, 83%, 84%, 85%, 86%, 87%, 88%, 89%, 90%, 91%, 92%, 93%, 94%, 95%, 96%, 97%, 98%, 99% or greater identity across the entire length of the amino acid sequence of SEQ ID NO: 138, SEQ ID NO: 272, SEQ ID NO: 273, SEQ ID NO: 274, SEQ ID NO: 275, SEQ ID NO: 276, SEQ ID NO: 277, SEQ ID NO: 278, SEQ ID NO: 279, SEQ ID NO: 280, SEQ ID NO: 281, SEQ ID NO: 282, SEQ ID NO: 283, SEQ ID NO: 284, SEQ ID NO: 285, SEQ ID NO: 286, SEQ ID NO: 287, SEQ ID NO: 288, SEQ ID NO: 289, SEQ ID NO: 290, SEQ ID NO: 291, SEQ ID NO: 292, SEQ ID NO: 293, SEQ ID NO: 294, SEQ ID NO: 295, SEQ ID NO: 296, SEQ ID NO: 297, SEQ ID NO: 298, SEQ ID NO: 299, SEQ ID NO: 300, SEQ ID NO: 301, SEQ ID NO: 302, SEQ ID NO: 303, SEQ ID NO: 304, SEQ ID NO: 305, SEQ ID NO: 306, SEQ ID NO: 307, SEQ ID NO: 308, SEQ ID NO: 309, SEQ ID NO: 310, SEQ ID NO: 311, SEQ ID NO: 312, SEQ ID NO: 313, SEQ ID NO: 314, SEQ ID NO: 315, SEQ ID NO: 316, SEQ ID NO: 317, SEQ ID NO: 318, SEQ ID NO: 319, SEQ ID NO: 320, SEQ ID NO: 321, SEQ ID NO: 322, SEQ ID NO: 323, SEQ ID NO: 324, SEQ ID NO: 325, SEQ ID NO: 326, SEQ ID NO: 327, SEQ ID NO: 328, SEQ ID NO: 329, SEQ ID NO: 330 or SEQ ID NO: 331.

[0073] In some embodiments an IPD099-3 polypeptide comprises an amino acid sequence having at least 95%, 95.5% 96%, 96.5%, 97%, 97%.5%, 98%, 98.1%, 98.2%, 98.3%, 98.4%, 98.5%, 98.6%, 98.7%, 98.8%, 98.9%, 99%, 99.1%, 99.2%, 99.3%, 99.4%, 99.5%, 99.6%, 99.7%, 99.8%, 99.9% or greater identity across the entire length of the amino acid sequence of SEQ ID NO: 138, SEQ ID NO: 272, SEQ ID NO: 273, SEQ ID NO: 275, SEQ ID NO: 285, SEQ ID NO: 286, SEQ ID NO: 288, SEQ ID NO: 289, SEQ ID NO: 290, SEQ ID NO: 291, SEQ ID NO: 292, SEQ ID NO: 293, SEQ ID NO: 294, SEQ ID NO: 295, SEQ ID NO: 296, SEQ ID NO: 298, SEQ ID NO: 299, SEQ ID NO: 300, SEQ ID NO: 301, SEQ ID NO: 302, SEQ ID NO: 304, SEQ ID NO: 306, SEQ ID NO: 307, SEQ ID NO: 308, SEQ ID NO: 312, SEQ ID NO: 313, SEQ ID NO: 320, SEQ ID NO: 323, SEQ ID NO: 324, SEQ ID NO: 326 or SEQ ID NO: 331.

[0074] In some embodiments an IPD099-3 polypeptide comprises an amino acid sequence of SEQ ID NO: 138, SEQ ID NO: 272, SEQ ID NO: 273, SEQ ID NO: 274, SEQ ID NO: 275, SEQ ID NO: 276, SEQ ID NO: 277, SEQ ID NO: 278, SEQ ID NO: 279, SEQ ID NO: 280, SEQ ID NO: 281, SEQ ID NO: 282, SEQ ID NO: 283, SEQ ID NO: 284, SEQ ID NO: 285, SEQ ID NO: 286, SEQ ID NO: 287, SEQ ID NO: 288, SEQ ID NO: 289, SEQ ID NO: 290, SEQ ID NO: 291, SEQ ID NO: 292, SEQ ID NO: 293, SEQ ID NO: 294, SEQ ID NO: 295, SEQ ID NO: 296, SEQ ID NO: 297, SEQ ID NO: 298, SEQ ID NO: 299, SEQ ID NO: 300, SEQ ID NO: 301, SEQ ID NO: 302, SEQ ID NO: 303, SEQ ID NO: 304, SEQ ID NO: 305, SEQ ID NO: 306, SEQ ID NO: 307, SEQ ID NO: 308, SEQ ID NO: 309, SEQ ID NO: 310, SEQ ID NO: 311, SEQ ID NO: 312, SEQ ID NO: 313, SEQ ID NO: 314, SEQ ID NO: 315, SEQ ID NO: 316, SEQ ID NO: 317, SEQ ID NO: 318, SEQ ID NO: 319, SEQ ID NO: 320, SEQ ID NO: 321, SEQ ID NO: 322, SEQ ID NO: 323, SEQ ID NO: 324, SEQ ID NO: 325, SEQ ID NO: 326, SEQ ID NO: 327, SEQ ID NO: 328, SEQ ID NO: 329, SEQ ID NO: 330 or SEQ ID NO: 331 having 1, 2, 3, 4, 5, 6, 7, 8, 9, 10 11, 12, 13, 14, 15, 16, 17, 18, 19, 20, 21, 22, 23, 24, 25, 26, 27, 28, 29, 30, 31, 32, 33, 34, 35, 36, 37, 38, 39, 40, 41, 42, 43, 44, 45, 46, 47, 48, 49, 50, 51, 52, 53, 54, 55, 56, 57, 58, 59, 60, 61, 62, 63, 64, 65, 66, 67, 68, 69, 70, 71, 72, 73, 74, 75, 76, 77, 78, 79, 80, 81, 82, 83, 84, 85, 86, 87, 88, 89, 90 or more amino acid substitutions compared to the native amino acid at the corresponding position of SEQ ID NO: 138, SEQ ID NO: 272, SEQ ID NO: 273, SEQ ID NO: 274, SEQ ID NO: 275, SEQ ID NO: 276, SEQ ID NO: 277, SEQ ID NO: 278, SEQ ID NO: 279, SEQ ID NO: 280, SEQ ID NO: 281, SEQ ID NO: 282, SEQ ID NO: 283, SEQ ID NO: 284, SEQ ID NO: 285, SEQ ID NO: 286, SEQ ID NO: 287, SEQ ID NO: 288, SEQ ID NO: 289, SEQ ID NO: 290, SEQ ID NO: 291, SEQ ID NO: 292, SEQ ID NO: 293, SEQ ID NO: 294, SEQ ID NO: 295, SEQ ID NO: 296, SEQ ID NO: 297, SEQ ID NO: 298, SEQ ID NO: 299, SEQ ID NO: 300, SEQ ID NO: 301, SEQ ID NO: 302, SEQ ID NO: 303, SEQ ID NO: 304, SEQ ID NO: 305, SEQ ID NO: 306, SEQ ID NO: 307, SEQ ID NO: 308, SEQ ID NO: 309, SEQ ID NO: 310, SEQ ID NO: 311, SEQ ID NO: 312, SEQ ID NO: 313, SEQ ID NO: 314, SEQ ID NO: 315, SEQ ID NO: 316, SEQ ID NO: 317, SEQ ID NO: 318, SEQ ID NO: 319, SEQ ID NO: 320, SEQ ID NO: 321, SEQ ID NO: 322, SEQ ID NO: 323, SEQ ID NO: 324, SEQ ID NO: 325, SEQ ID NO: 326, SEQ ID NO: 327, SEQ ID NO: 328, SEQ ID NO: 329, SEQ ID NO: 330 or SEQ ID NO: 331.

[0075] In some embodiments, the IPD099-3 polypeptide comprises the amino acid sequence of SEQ ID NO: 138, SEQ ID NO: 272, SEQ ID NO: 273, SEQ ID NO: 274, SEQ ID NO: 275, SEQ ID NO: 276, SEQ ID NO: 277, SEQ ID NO: 278, SEQ ID NO: 279, SEQ ID NO: 280, SEQ ID NO: 281, SEQ ID NO: 282, SEQ ID NO: 283, SEQ ID NO: 284, SEQ ID NO: 285, SEQ ID NO: 286, SEQ ID NO: 287, SEQ ID NO: 288, SEQ ID NO: 289, SEQ ID NO: 290, SEQ ID NO: 291, SEQ ID NO: 292, SEQ ID NO: 293, SEQ ID NO: 294, SEQ ID NO: 295, SEQ ID NO: 296, SEQ ID NO: 297, SEQ ID NO: 298, SEQ ID NO: 299, SEQ ID NO: 300, SEQ ID NO: 301, SEQ ID NO: 302, SEQ ID NO: 303, SEQ ID NO: 304, SEQ ID NO: 305, SEQ ID NO: 306, SEQ ID NO: 307, SEQ ID NO: 308, SEQ ID NO: 309, SEQ ID NO: 310, SEQ ID NO: 311, SEQ ID NO: 312, SEQ ID NO: 313, SEQ ID NO: 314, SEQ ID NO: 315, SEQ ID NO: 316, SEQ ID NO: 317, SEQ ID NO: 318, SEQ ID NO: 319, SEQ ID NO: 320, SEQ ID NO: 321, SEQ ID NO: 322, SEQ ID NO: 323, SEQ ID NO: 324, SEQ ID NO: 325, SEQ ID NO: 326, SEQ ID NO: 327, SEQ ID NO: 328, SEQ ID NO: 329, SEQ ID NO: 330 or SEQ ID NO: 331.

[0076] In some embodiments, the IPD099-3 polypeptide comprises the amino acid sequence of SEQ ID NO: 138, SEQ ID NO: 272, SEQ ID NO: 273, SEQ ID NO: 275, SEQ ID NO: 285, SEQ ID NO: 286, SEQ ID NO: 288, SEQ ID NO: 289, SEQ ID NO: 290, SEQ ID NO: 291, SEQ ID NO: 292, SEQ ID NO: 293, SEQ ID NO: 294, SEQ ID NO: 295, SEQ ID NO: 296, SEQ ID NO: 298, SEQ ID NO: 299, SEQ ID NO: 300, SEQ ID NO: 301, SEQ ID NO: 302, SEQ ID NO: 304, SEQ ID NO: 306, SEQ ID NO: 307, SEQ ID NO: 308, SEQ ID NO: 312, SEQ ID NO: 313, SEQ ID NO: 320, SEQ ID NO: 323, SEQ ID NO: 324, SEQ ID NO: 326, SEQ ID NO: 331.

### IPD100-1 and IPD100-2 Proteins and Variants and Fragments Thereof

[0077] IPD100-1 and IPD100-2 polypeptides are encompassed by the disclosure. “IPD100-1 polypeptide”, and “IPD100-1 protein” as used herein interchangeably refers to a polypeptide having insecticidal activity, in combination with a IPD100-2 polypeptide, against one or more insect pests of the Lepidoptera and/or Coleoptera orders including but not limited to Western corn rootworm (WCRVV), and is sufficiently homologous to the IPD100-1 polypeptide of SEQ ID NO: 332. A variety of IPD100-1 polypeptide homologs are contemplated. Sources of IPD100-1 polypeptide homologs or related proteins include bacterial species selected from but not limited to Pseudomonas species, Candidatus species, Burkholderia species, Duganella species, Salmonella species, Tenacibaculum species, Dickeya species, Pedobacter species, and Mycobacterium species. Alignment of the amino acid sequences of IPD100-1 polypeptide homologs allows for the identification of residues that are highly conserved amongst the natural homologs of this family. IPD100-1 homologs can be aligned in a similar manner as shown in FIGS. 1 and 2 for IPD092-1 and IPD092-2 homologs to identify conserved amino acid positions, positions tolerant to change, motifs, and domains. In some embodiments, the sequence homology is against the full-length sequence of an IPD100-1 polypeptide. In some embodiments, the IPD100-1 polypeptide has at least about 40%, 45%, 50%, 51%, 52%, 53%, 54%, 55%, 56%, 57%, 58%, 59%, 60%, 61%, 62%, 63%, 64%, 65%, 66%, 67%, 68%, 69%, 70%, 71%, 72%, 73%, 74%, 75%, 76%, 77%, 78%, 79%, 80%, 81%, 82%, 83%, 84%, 85%, 86%, 87%, 88%, 89%, 90%, 91%, 92%, 93%, 94%, 95%, 96%, 97%, 98%, 99% or greater sequence identity compared to SEQ ID NO: 332, SEQ ID NO: 334, SEQ ID NO: 335 or SEQ ID NO: 336.

[0078] In some embodiments an IPD100-1 polypeptide comprises an amino acid sequence having at least about 70%, 71%, 72%, 73%, 74%, 75%, 76%, 77%, 78%, 79%, 80%, 81%, 82%, 83%, 84%, 85%, 86%, 87%, 88%, 89%, 90%, 91%, 92%, 93%, 94%, 95%, 96%, 97%, 98%, 99% or greater identity across the entire length of the amino acid sequence of SEQ ID NO: 332, SEQ ID NO: 334, SEQ ID NO: 335 or SEQ ID NO: 336.

[0079] In some embodiments, an IPD100-1 polypeptide comprises an amino acid sequence having at least 95%, 95.5% 96%, 96.5%, 97%, 97%.5%, 98%, 98.1%, 98.2%, 98.3%, 98.4%, 98.5%, 98.6%, 98.7%, 98.8%, 98.9%, 99%, 99.1%, 99.2%, 99.3%, 99.4%, 99.5%, 99.6%, 99.7%, 99.8%, 99.9% or greater identity across the entire length of the amino acid sequence of SEQ ID NO: 332.

[0080] In some embodiments an IPD100-1 polypeptide comprises an amino acid sequence of SEQ ID NO: 332, SEQ ID NO: 334, SEQ ID NO: 335 or SEQ ID NO: 336 having 1, 2, 3, 4, 5, 6, 7, 8, 9, 10 11, 12, 13, 14, 15, 16, 17, 18, 19, 20, 21, 22, 23, 24, 25, 26, 27, 28, 29, 30, 31, 32, 33, 34, 35, 36, 37, 38, 39, 40, 41, 42, 43, 44, 45, 46, 47, 48, 49, 50, 51, 52, 53, 54, 55, 56, 57, 58, 59, 60, 61, 62, 63, 64, 65, 66, 67, 68, 69, 70, 71, 72, 73, 74, 75 or more amino acid substitutions compared to the native amino acid at the corresponding position of SEQ ID NO: 332, SEQ ID NO: 334, SEQ ID NO: 335 or SEQ ID NO: 336.

[0081] In some embodiments, the IPD100-1 polypeptide comprises the amino acid sequence of SEQ ID NO: 332, SEQ ID NO: 334, SEQ ID NO: 335 or SEQ ID NO: 336.

[0082] In some embodiments, the IPD100-1 polypeptide comprises the amino acid sequence of SEQ ID NO: 332.

[0083] “IPD100-2 polypeptide”, and “IPD100-2 protein” as used herein interchangeably refers to a polypeptide having insecticidal activity, in combination with a IPD100-1 polypeptide, against one or more insect pests of the Lepidoptera and/or Coleoptera orders including but not limited to Western corn rootworm (WCRW), and is sufficiently homologous to the IPD100-2 polypeptide of SEQ ID NO: 333. A variety of IPD100-2 polypeptide homologs are contemplated. Sources of IPD100-2 polypeptide homologs or related proteins include bacterial species selected from but not limited to Pseudomonas species, Candidatus species, Burkholderia species, Duganella species, Salmonella species, Tenacibaculum species, Dickeya species, Pedobacter species, and Mycobacterium species. Alignment of the amino acid sequences of IPD100-2 polypeptide homologs allows for the identification of residues that are highly conserved amongst the natural homologs of this family. IPD100-2 homologs can be aligned in a similar manner as shown in FIGS. 1 and 2 for IPD092-1 and IPD092-2 homologs to identify conserved amino acid positions, positions tolerant to change, motifs, and domains.

[0084] In some embodiments, the sequence homology is against the full-length sequence of an IPD100-2 polypeptide. In some embodiments, the IPD100-2 polypeptide has at least about 40%, 45%, 50%, 51%, 52%, 53%, 54%, 55%, 56%, 57%, 58%, 59%, 60%, 61%, 62%, 63%, 64%, 65%, 66%, 67%, 68%, 69%, 70%, 71%, 72%, 73%, 74%, 75%, 76%, 77%, 78%, 79%, 80%, 81%, 82%, 83%, 84%, 85%, 86%, 87%, 88%, 89%, 90%, 91%, 92%, 93%, 94%, 95%, 96%, 97%, 98%, 99% or greater sequence identity compared to SEQ ID NO: 333, SEQ ID NO: 337, SEQ ID NO: 338, SEQ ID NO: 339, SEQ ID NO: 340, SEQ ID NO: 341, SEQ ID NO: 342, SEQ ID NO: 343, SEQ ID NO: 344, SEQ ID NO: 345, SEQ ID NO: 346, SEQ ID NO: 347, SEQ ID NO: 348 or SEQ ID NO: 349.

[0085] In some embodiments an IPD100-2 polypeptide comprises an amino acid sequence having at least about 70%, 71%, 72%, 73%, 74%, 75%, 76%, 77%, 78%, 79%, 80%, 81%, 82%, 83%, 84%, 85%, 86%, 87%, 88%, 89%, 90%, 91%, 92%, 93%, 94%, 95%, 96%, 97%, 98%, 99% or greater identity across the entire length of the amino acid sequence of SEQ ID NO: 333, SEQ ID NO: 337, SEQ ID NO: 338, SEQ ID NO: 339, SEQ ID NO: 340, SEQ ID NO: 341, SEQ ID NO: 342, SEQ ID NO: 343, SEQ ID NO: 344, SEQ ID NO: 345, SEQ ID NO: 346, SEQ ID NO: 347, SEQ ID NO: 348 or SEQ ID NO: 349.

[0086] In some embodiments an IPD100-2 polypeptide comprises an amino acid sequence having at least 95%, 95.5% 96%, 96.5%, 97%, 97%.5%, 98%, 98.1%, 98.2%, 98.3%, 98.4%, 98.5%, 98.6%, 98.7%, 98.8%, 98.9%, 99%, 99.1%, 99.2%, 99.3%, 99.4%, 99.5%, 99.6%, 99.7%, 99.8%, 99.9% or greater identity across the entire length of the amino acid sequence of SEQ ID NO: 333, SEQ ID NO: 337, SEQ ID NO: 338, SEQ ID NO: 341, SEQ ID NO: 342, SEQ ID NO: 343, SEQ ID NO: 344 or SEQ ID NO: 347.

[0087] In some embodiments an IPD100-2 polypeptide comprises an amino acid sequence of SEQ ID NO: 333, SEQ ID NO: 337, SEQ ID NO: 338, SEQ ID NO: 339, SEQ ID NO: 340, SEQ ID NO: 341, SEQ ID NO: 342, SEQ ID NO: 343, SEQ ID NO: 344, SEQ ID NO: 345, SEQ ID NO: 346, SEQ ID NO: 347, SEQ ID NO: 348 or SEQ ID NO: 349 having 1, 2, 3, 4, 5, 6, 7, 8, 9, 10 11, 12, 13, 14, 15, 16, 17, 18, 19, 20, 21, 22, 23, 24, 25, 26, 27, 28, 29, 30, 31, 32, 33, 34, 35, 36, 37, 38, 39, 40, 41, 42, 43, 44, 45, 46, 47, 48, 49, 50, 51, 52, 53, 54, 55, 56, 57, 58, 59, 60, 61, 62, 63, 64, 65, 66, 67, 68, 69, 70, 71, 72, 73, 74, 75, 76, 77, 78, 79, 80, 81, 82, 83, 84, 85, 86, 87, 88, 89, 90 or more amino acid substitutions compared to the native amino acid at the corresponding position of SEQ ID NO: 333, SEQ ID NO: 337, SEQ ID NO: 338, SEQ ID NO: 339, SEQ ID NO: 340, SEQ ID NO: 341, SEQ ID NO: 342, SEQ ID NO: 343, SEQ ID NO: 344, SEQ ID NO: 345, SEQ ID NO: 346, SEQ ID NO: 347, SEQ ID NO: 348 or SEQ ID NO: 349.

[0088] In some embodiments, the IPD100-2 polypeptide comprises the amino acid sequence of SEQ ID NO: 333, SEQ ID NO: 337, SEQ ID NO: 338, SEQ ID NO: 339, SEQ ID NO: 340, SEQ ID NO: 341, SEQ ID NO: 342, SEQ ID NO: 343, SEQ ID NO: 344, SEQ ID NO: 345, SEQ ID NO: 346, SEQ ID NO: 347, SEQ ID NO: 348 or SEQ ID NO: 349.

[0089] In some embodiments, the IPD100-2 polypeptide comprises the amino acid sequence of SEQ ID NO: 333, SEQ ID NO: 337, SEQ ID NO: 338, SEQ ID NO: 341, SEQ ID NO: 342, SEQ ID NO: 343, SEQ ID NO: 344 or SEQ ID NO: 347.

### IPD105 Proteins and Variants and Fragments Thereof

[0090] IPD105 polypeptides are encompassed by the disclosure. “IPD105 polypeptide”, and “IPD105 protein” as used herein interchangeably refers to a polypeptide having insecticidal activity against one or more insect pests of the Lepidoptera and/or Coleoptera orders including but not limited to Western corn rootworm (WCRW), and is sufficiently homologous to the IPD105 polypeptide of SEQ ID NO: 350. A variety of IPD105 polypeptide homologs are contemplated. Sources of IPD105 polypeptide homologs or related proteins include bacterial species selected from but not limited to Chromobacterium species and Pseudogulbenkiania species. Alignment of the amino acid sequences of IPD105 polypeptide homologs (for example—FIG. 3A-3B), allows for the identification of residues that are highly conserved amongst the natural homologs of this family. IPD105 homologs can be aligned in a similar manner as shown in FIGS. 1 and 2 for IPD092-1 and IPD092-2 homologs to identify conserved amino acid positions, positions tolerant to change, motifs, and domains.

[0091] In some embodiments, the sequence homology is against the full-length sequence of an

[0092] IPD105 polypeptide. In some embodiments, the IPD105 polypeptide has at least about 40%, 45%, 50%, 51%, 52%, 53%, 54%, 55%, 56%, 57%, 58%, 59%, 60%, 61%, 62%, 63%, 64%, 65%, 66%, 67%, 68%, 69%, 70%, 71%, 72%, 73%, 74%, 75%, 76%, 77%, 78%, 79%, 80%, 81%, 82%, 83%, 84%, 85%, 86%, 87%, 88%, 89%, 90%, 91%, 92%, 93%, 94%, 95%, 96%, 97%, 98%, 99% or greater sequence identity compared to SEQ ID NO: 350, SEQ ID NO: 351, SEQ ID NO: 352, SEQ ID NO: 353, SEQ ID NO: 354, SEQ ID NO: 355, SEQ ID NO: 356, SEQ ID NO: 357, SEQ ID NO: 358, SEQ ID NO: 359, SEQ ID NO: 360, SEQ ID NO: 361, SEQ ID NO: 362, SEQ ID NO: 363, SEQ ID NO: 364 or SEQ ID NO: 365.

[0093] In some embodiments an IPD105 polypeptide comprises an amino acid sequence having at least about 70%, 71%, 72%, 73%, 74%, 75%, 76%, 77%, 78%, 79%, 80%, 81%, 82%, 83%, 84%, 85%, 86%, 87%, 88%, 89%, 90%, 91%, 92%, 93%, 94%, 95%, 96%, 97%, 98%, 99% or greater identity across the entire length of the amino acid sequence of SEQ ID NO: 350, SEQ ID NO: 351, SEQ ID NO: 352, SEQ ID NO: 353, SEQ ID NO: 354, SEQ ID NO: 355, SEQ ID NO: 356, SEQ ID NO: 357, SEQ ID NO: 358, SEQ ID NO: 359, SEQ ID NO: 360, SEQ ID NO: 361, SEQ ID NO: 362, SEQ ID NO: 363, SEQ ID NO: 364 or SEQ ID NO: 365.

[0094] In some embodiments an IPD105 polypeptide comprises an amino acid sequence having at least 95%, 95.5% 96%, 96.5%, 97%, 97%.5%, 98%, 98.1%, 98.2%, 98.3%, 98.4%, 98.5%, 98.6%, 98.7%, 98.8%, 98.9%, 99%, 99.1%, 99.2%, 99.3%, 99.4%, 99.5%, 99.6%, 99.7%, 99.8%, 99.9% or greater identity across the entire length of the amino acid sequence of SEQ ID NO: 350, SEQ ID NO: 353, SEQ ID NO: 355, SEQ ID NO: 357 or SEQ ID NO: 362.

[0095] In some embodiments an IPD105 polypeptide comprises an amino acid sequence of SEQ ID NO: 350, SEQ ID NO: 351, SEQ ID NO: 352, SEQ ID NO: 353, SEQ ID NO: 354, SEQ ID NO: 355, SEQ ID NO: 356, SEQ ID NO: 357, SEQ ID NO: 358, SEQ ID NO: 359, SEQ ID NO: 360, SEQ ID NO: 361, SEQ ID NO: 362, SEQ ID NO: 363, SEQ ID NO: 364 or SEQ ID NO: 365 having 1, 2, 3, 4, 5, 6, 7, 8, 9, 10 11, 12, 13, 14, 15, 16, 17, 18, 19, 20, 21, 22, 23, 24, 25, 26, 27, 28, 29, 30, 31, 32, 33, 34, 35, 36, 37, 38, 39, 40, 41, 42, 43, 44, 45, 46, 47, 48, 49, 50, 51, 52, 53, 54, 55, 56, 57, 58, 59, 60, 61, 62, 63, 64, 65, 66, 67, 68, 69, 70 or more amino acid substitutions compared to the native amino acid at the corresponding position of SEQ ID NO: 350, SEQ ID NO: 351, SEQ ID NO: 352, SEQ ID NO: 353, SEQ ID NO: 354, SEQ ID NO: 355, SEQ ID NO: 356, SEQ ID NO: 357, SEQ ID NO: 358, SEQ ID NO: 359, SEQ ID NO: 360, SEQ ID NO: 361, SEQ ID NO: 362, SEQ ID NO: 363, SEQ ID NO: 364 or SEQ ID NO: 365.

[0096] In some embodiments, the IPD105 polypeptide comprises the amino acid sequence of SEQ ID NO: 350, SEQ ID NO: 351, SEQ ID NO: 352, SEQ ID NO: 353, SEQ ID NO: 354, SEQ ID NO: 355, SEQ ID NO: 356, SEQ ID NO: 357, SEQ ID NO: 358, SEQ ID NO: 359, SEQ ID NO: 360, SEQ ID NO: 361, SEQ ID NO: 362, SEQ ID NO: 363, SEQ ID NO: 364 or SEQ ID NO: 365.

[0097] In some embodiments, the IPD105 polypeptide comprises the amino acid sequence of SEQ ID NO: 350, SEQ ID NO: 353, SEQ ID NO: 355, SEQ ID NO: 357 or SEQ ID NO: 362.

### IPD106-1 and IPD106-2 Proteins and Variants and Fragments Thereof

[0098] IPD106-1 and IPD106-2 polypeptides are encompassed by the disclosure. “IPD106-1 polypeptide”, and “IPD106-1 protein” as used herein interchangeably refers to a polypeptide having insecticidal activity, in combination with a IPD106-2 polypeptide, against one or more insect pests of the Lepidoptera and/or Coleoptera orders including but not limited to Western corn rootworm (WCRW), and is sufficiently homologous to the IPD106-1 polypeptide of SEQ ID NO: 366. A variety of IPD106-1 polypeptide homologs are contemplated. Sources of IPD106-1 polypeptide homologs or related proteins include bacterial species selected from but not limited to Arsenicibacter species and Chitinophaga species. Alignment of the amino acid sequences of IPD106-1 polypeptide homologs allows for the identification of residues that are highly conserved amongst the natural homologs of this family. IPD106-1 homologs can be aligned in a similar manner as shown in FIGS. 1 and 2 for IPD092-1 and IPD092-2 homologs to identify conserved amino acid positions, positions tolerant to change, motifs, and domains.

[0099] In some embodiments, the sequence homology is against the full-length sequence of an IPD106-1 polypeptide. In some embodiments, the IPD106-1 polypeptide has at least about 40%, 45%, 50%, 51%, 52%, 53%, 54%, 55%, 56%, 57%, 58%, 59%, 60%, 61%, 62%, 63%, 64%, 65%, 66%, 67%, 68%, 69%, 70%, 71%, 72%, 73%, 74%, 75%, 76%, 77%, 78%, 79%, 80%, 81%, 82%, 83%, 84%, 85%, 86%, 87%, 88%, 89%, 90%, 91%, 92%, 93%, 94%, 95%, 96%, 97%, 98%, 99% or greater sequence identity compared to SEQ ID NO: 366, SEQ ID NO: 368, SEQ ID NO: 369, SEQ ID NO: 370 or SEQ ID NO: 371.

[0100] In some embodiments an IPD106-1 polypeptide comprises an amino acid sequence having at least about 70%, 71%, 72%, 73%, 74%, 75%, 76%, 77%, 78%, 79%, 80%, 81%, 82%, 83%, 84%, 85%, 86%, 87%, 88%, 89%, 90%, 91%, 92%, 93%, 94%, 95%, 96%, 97%, 98%, 99% or greater identity across the entire length of the amino acid sequence of SEQ ID NO: 366, SEQ ID NO: 368, SEQ ID NO: 369, SEQ ID NO: 370 or SEQ ID NO: 371.

[0101] In some embodiments an IPD106-1 polypeptide comprises an amino acid sequence having at least 95%, 95.5% 96%, 96.5%, 97%, 97%.5%, 98%, 98.1%, 98.2%, 98.3%, 98.4%, 98.5%, 98.6%, 98.7%, 98.8%, 98.9%, 99%, 99.1%, 99.2%, 99.3%, 99.4%, 99.5%, 99.6%, 99.7%, 99.8%, 99.9% or greater identity across the entire length of the amino acid sequence of SEQ ID NO: 366, SEQ ID NO: 368 or SEQ ID NO: 369.

[0102] In some embodiments an IPD106-1 polypeptide comprises an amino acid sequence of SEQ ID NO: 366, SEQ ID NO: 368, SEQ ID NO: 369, SEQ ID NO: 370 or SEQ ID NO: 371 having 1, 2, 3, 4, 5, 6, 7, 8, 9, 10 11, 12, 13, 14, 15, 16, 17, 18, 19, 20, 21, 22, 23, 24, 25, 26, 27, 28, 29, 30, 31, 32, 33, 34, 35, 36, 37, 38, 39, 40, 41, 42, 43, 44, 45, 46, 47, 48, 49, 50, 51, 52, 53, 54, 55, 56, 57, 58, 59, 60, 61, 62, 63, 64, 65, 66, 67, 68, 69, 70, 71, 72, 73, 74, 75, 76, 77, 78, 79, 80, 81, 82, 83, 84, 85, 86, 87, 88, 89, 90 or more amino acid substitutions compared to the native amino acid at the corresponding position of SEQ ID NO: 366, SEQ ID NO: 368, SEQ ID NO: 369, SEQ ID NO: 370 or SEQ ID NO: 371.

[0103] In some embodiments, the IPD106-1 polypeptide comprises the amino acid sequence of SEQ ID NO: 366, SEQ ID NO: 368, SEQ ID NO: 369, SEQ ID NO: 370 or SEQ ID NO: 371.

[0104] In some embodiments, the IPD106-1 polypeptide comprises the amino acid sequence of SEQ ID NO: 366, SEQ ID NO: 368 or SEQ ID NO: 369.

[0105] “IPD106-2 polypeptide”, and “IPD106-2 protein” as used herein interchangeably refers to a polypeptide having insecticidal activity, in combination with a IPD106-1 polypeptide, against one or more insect pests of the Lepidoptera and/or Coleoptera orders including but not limited to Western corn rootworm (WCRW), and is sufficiently homologous to the IPD106-2 polypeptide of SEQ ID NO: 367. A variety of IPD106-2 polypeptide homologs are contemplated. Sources of IPD106-2 polypeptide homologs or related proteins include bacterial species selected from but not limited to Arsenicibacter species and Chitinophaga species. Alignment of the amino acid sequences of IPD106-2 polypeptide homologs allows for the identification of residues that are highly conserved amongst the natural homologs of this family. IPD106-2 homologs can be in a similar manner as shown in FIGS. 1 and 2 for IPD092-1 and IPD092-2 homologs to identify conserved amino acid positions, positions tolerant to change, motifs, and domains.

[0106] In some embodiments, the sequence homology is against the full-length sequence of an IPD106-2 polypeptide. In some embodiments, the IPD106-2 polypeptide has at least about 40%, 45%, 50%, 51%, 52%, 53%, 54%, 55%, 56%, 57%, 58%, 59%, 60%, 61%, 62%, 63%, 64%, 65%, 66%, 67%, 68%, 69%, 70%, 71%, 72%, 73%, 74%, 75%, 76%, 77%, 78%, 79%, 80%, 81%, 82%, 83%, 84%, 85%, 86%, 87%, 88%, 89%, 90%, 91%, 92%, 93%, 94%, 95%, 96%, 97%, 98%, 99% or greater sequence identity compared to SEQ ID NO: 367, SEQ ID NO: 372, SEQ ID NO: 373, SEQ ID NO: 374, SEQ ID NO: 375 or SEQ ID NO: 376.

[0107] In some embodiments an IPD106-2 polypeptide comprises an amino acid sequence having at least about 70%, 71%, 72%, 73%, 74%, 75%, 76%, 77%, 78%, 79%, 80%, 81%, 82%, 83%, 84%, 85%, 86%, 87%, 88%, 89%, 90%, 91%, 92%, 93%, 94%, 95%, 96%, 97%, 98%, 99% or greater identity across the entire length of the amino acid sequence of SEQ ID NO: 367, SEQ ID NO: 372, SEQ ID NO: 373, SEQ ID NO: 374, SEQ ID NO: 375 or SEQ ID NO: 376.

[0108] In some embodiments an IPD106-2 polypeptide comprises an amino acid sequence having at least 95%, 95.5% 96%, 96.5%, 97%, 97%.5%, 98%, 98.1%, 98.2%, 98.3%, 98.4%, 98.5%, 98.6%, 98.7%, 98.8%, 98.9%, 99%, 99.1%, 99.2%, 99.3%, 99.4%, 99.5%, 99.6%, 99.7%, 99.8%, 99.9% or greater identity across the entire length of the amino acid sequence of SEQ ID NO: 367, SEQ ID NO: 372, SEQ ID NO: 373 or SEQ ID NO: 376.

[0109] In some embodiments an IPD106-2 polypeptide comprises an amino acid sequence of SEQ ID NO: 367, SEQ ID NO: 372, SEQ ID NO: 373, SEQ ID NO: 374, SEQ ID NO: 375 or SEQ ID NO: 376 having 1, 2, 3, 4, 5, 6, 7, 8, 9, 10 11, 12, 13, 14, 15, 16, 17, 18, 19, 20, 21, 22, 23, 24, 25, 26, 27, 28, 29, 30, 31, 32, 33, 34, 35, 36, 37, 38, 39, 40, 41, 42, 43, 44, 45, 46, 47, 48, 49, 50, 51, 52, 53, 54, 55, 56, 57, 58, 59, 60, 61, 62, 63, 64, 65, 66, 67, 68, 69, 70, 71, 72, 73, 74, 75, 76, 77, 78, 79, 80, 81, 82, 83, 84, 85, 86, 87, 88, 89, 90 or more amino acid substitutions compared to the native amino acid at the corresponding position of SEQ ID NO: 367, SEQ ID NO: 372, SEQ ID NO: 373, SEQ ID NO: 374, SEQ ID NO: 375 or SEQ ID NO: 376.

[0110] In some embodiments, the IPD106-2 polypeptide comprises the amino acid sequence of SEQ ID NO: 367, SEQ ID NO: 372, SEQ ID NO: 373, SEQ ID NO: 374, SEQ ID NO: 375 or SEQ ID NO: 376.

[0111] In some embodiments, the IPD106-2 polypeptide comprises the amino acid sequence of SEQ ID NO: 367, SEQ ID NO: 372, SEQ ID NO: 373 or SEQ ID NO: 376.

### IPD107 Proteins and Variants and Fragments Thereof

[0112] IPD107 polypeptides are encompassed by the disclosure. “IPD107 polypeptide”, and “IPD107 protein” as used herein interchangeably refers to a polypeptide having insecticidal activity against one or more insect pests of the Lepidoptera and/or Coleoptera orders including but not limited to Western corn rootworm (WCRW), and is sufficiently homologous to the IPD107 polypeptide of SEQ ID NO: 377. A variety of IPD107 polypeptide homologs are contemplated. Sources of IPD107 polypeptide homologs or related proteins include bacterial species selected from but not limited to Pseudomonas species, Chromobacterium species, and Bradyrhizobium species. Alignment of the amino acid sequences of IPD107 polypeptide homologs allows for the identification of residues that are highly conserved amongst the natural homologs of this family. IPD107 homologs can be aligned in a similar manner as shown in FIGS. 1 and 2 for IPD092-1 and IPD092-2 homologs, to identify conserved amino acid positions, positions tolerant to change, motifs, and domains.

[0113] In some embodiments, the sequence homology is against the full-length sequence of an IPD107 polypeptide. In some embodiments, the IPD107 polypeptide has at least about 40%, 45%, 50%, 51%, 52%, 53%, 54%, 55%, 56%, 57%, 58%, 59%, 60%, 61%, 62%, 63%, 64%, 65%, 66%, 67%, 68%, 69%, 70%, 71%, 72%, 73%, 74%, 75%, 76%, 77%, 78%, 79%, 80%, 81%, 82%, 83%, 84%, 85%, 86%, 87%, 88%, 89%, 90%, 91%, 92%, 93%, 94%, 95%, 96%, 97%, 98%, 99% or greater sequence identity compared to SEQ ID NO: 377, SEQ ID NO: 378, SEQ ID NO: 379, SEQ ID NO: 380, SEQ ID NO: 381, SEQ ID NO: 382, SEQ ID NO: 383, SEQ ID NO: 384, SEQ ID NO: 385, SEQ ID NO: 386, SEQ ID NO: 387, SEQ ID NO: 388, SEQ ID NO: 389, SEQ ID NO: 390, SEQ ID NO: 391, SEQ ID NO: 392, SEQ ID NO: 393, SEQ ID NO: 394, SEQ ID NO: 395, SEQ ID NO: 396, SEQ ID NO: 397, SEQ ID NO: 398, SEQ ID NO: 399, SEQ ID NO: 400, SEQ ID NO: 401, SEQ ID NO: 402, SEQ ID NO: 403, SEQ ID NO: 404, SEQ ID NO: 405, SEQ ID NO: 406, SEQ ID NO: 407, SEQ ID NO: 408, SEQ ID NO: 409, SEQ ID NO: 410, SEQ ID NO: 411, SEQ ID NO: 412, SEQ ID NO: 413, SEQ ID NO: 414, SEQ ID NO: 415, SEQ ID NO: 416, SEQ ID NO: 417, SEQ ID NO: 418, SEQ ID NO: 419, SEQ ID NO: 420, SEQ ID NO: 421, SEQ ID NO: 422, SEQ ID NO: 423, SEQ ID NO: 424, SEQ ID NO: 425, SEQ ID NO: 426, SEQ ID NO: 427, SEQ ID NO: 428, SEQ ID NO: 429, SEQ ID NO: 430, SEQ ID NO: 431, SEQ ID NO: 432, SEQ ID NO: 433, SEQ ID NO: 434, SEQ ID NO: 435, SEQ ID NO: 436, SEQ ID NO: 437, SEQ ID NO: 438, SEQ ID NO: 439, SEQ ID NO: 440, SEQ ID NO: 441, SEQ ID NO: 442, SEQ ID NO: 443, SEQ ID NO: 444, SEQ ID NO: 445, SEQ ID NO: 446, SEQ ID NO: 447, SEQ ID NO: 448, SEQ ID NO: 449, SEQ ID NO: 450, SEQ ID NO: 451 or SEQ ID NO: 452.

[0114] In some embodiments an IPD107 polypeptide comprises an amino acid sequence having at least about 70%, 71%, 72%, 73%, 74%, 75%, 76%, 77%, 78%, 79%, 80%, 81%, 82%, 83%, 84%, 85%, 86%, 87%, 88%, 89%, 90%, 91%, 92%, 93%, 94%, 95%, 96%, 97%, 98%, 99% or greater identity across the entire length of the amino acid sequence of SEQ ID NO: 377, SEQ ID NO: 378, SEQ ID NO: 379, SEQ ID NO: 380, SEQ ID NO: 381, SEQ ID NO: 382, SEQ ID NO: 383, SEQ ID NO: 384, SEQ ID NO: 385, SEQ ID NO: 386, SEQ ID NO: 387, SEQ ID NO: 388, SEQ ID NO: 389, SEQ ID NO: 390, SEQ ID NO: 391, SEQ ID NO: 392, SEQ ID NO: 393, SEQ ID NO: 394, SEQ ID NO: 395, SEQ ID NO: 396, SEQ ID NO: 397, SEQ ID NO: 398, SEQ ID NO: 399, SEQ ID NO: 400, SEQ ID NO: 401, SEQ ID NO: 402, SEQ ID NO: 403, SEQ ID NO: 404, SEQ ID NO: 405, SEQ ID NO: 406, SEQ ID NO: 407, SEQ ID NO: 408, SEQ ID NO: 409, SEQ ID NO: 410, SEQ ID NO: 411, SEQ ID NO: 412, SEQ ID NO: 413, SEQ ID NO: 414, SEQ ID NO: 415, SEQ ID NO: 416, SEQ ID NO: 417, SEQ ID NO: 418, SEQ ID NO: 419, SEQ ID NO: 420, SEQ ID NO: 421, SEQ ID NO: 422, SEQ ID NO: 423, SEQ ID NO: 424, SEQ ID NO: 425, SEQ ID NO: 426, SEQ ID NO: 427, SEQ ID NO: 428, SEQ ID NO: 429, SEQ ID NO: 430, SEQ ID NO: 431, SEQ ID NO: 432, SEQ ID NO: 433, SEQ ID NO: 434, SEQ ID NO: 435, SEQ ID NO: 436, SEQ ID NO: 437, SEQ ID NO: 438, SEQ ID NO: 439, SEQ ID NO: 440, SEQ ID NO: 441, SEQ ID NO: 442, SEQ ID NO: 443, SEQ ID NO: 444, SEQ ID NO: 445, SEQ ID NO: 446, SEQ ID NO: 447, SEQ ID NO: 448, SEQ ID NO: 449, SEQ ID NO: 450, SEQ ID NO: 451 or SEQ ID NO: 452.

[0115] In some embodiments an IPD107 polypeptide comprises an amino acid sequence having at least 95%, 95.5% 96%, 96.5%, 97%, 97%.5%, 98%, 98.1%, 98.2%, 98.3%, 98.4%, 98.5%, 98.6%, 98.7%, 98.8%, 98.9%, 99%, 99.1%, 99.2%, 99.3%, 99.4%, 99.5%, 99.6%, 99.7%, 99.8%, 99.9% or greater identity across the entire length of the amino acid sequence of SEQ ID NO: 377, SEQ ID NO: 378, SEQ ID NO: 381, SEQ ID NO: 382, SEQ ID NO: 384, SEQ ID NO: 386, SEQ ID NO: 387, SEQ ID NO: 388, SEQ ID NO: 389, SEQ ID NO: 390, SEQ ID NO: 391, SEQ ID NO: 393, SEQ ID NO: 396, SEQ ID NO: 397, SEQ ID NO: 398, SEQ ID NO: 400, SEQ ID NO: 401, SEQ ID NO: 402, SEQ ID NO: 403, SEQ ID NO: 404, SEQ ID NO: 405, SEQ ID NO: 407, SEQ ID NO: 409, SEQ ID NO: 410, SEQ ID NO: 411, SEQ ID NO: 412, SEQ ID NO: 413, SEQ ID NO: 414, SEQ ID NO: 415, SEQ ID NO: 417, SEQ ID NO: 418, SEQ ID NO: 419, SEQ ID NO: 420, SEQ ID NO: 421, SEQ ID NO: 422, SEQ ID NO: 426, SEQ ID NO: 427, SEQ ID NO: 428, SEQ ID NO: 429, SEQ ID NO: 430, SEQ ID NO: 431, SEQ ID NO: 432, SEQ ID NO: 433, SEQ ID NO: 434, SEQ ID NO: 435, SEQ ID NO: 438, SEQ ID NO: 439, SEQ ID NO: 440, SEQ ID NO: 442, SEQ ID NO: 443, SEQ ID NO: 445, SEQ ID NO: 446, SEQ ID NO: 451 or SEQ ID NO: 452.

[0116] In some embodiments an IPD107 polypeptide comprises an amino acid sequence of SEQ ID NO: 377, SEQ ID NO: 378, SEQ ID NO: 379, SEQ ID NO: 380, SEQ ID NO: 381, SEQ ID NO: 382, SEQ ID NO: 383, SEQ ID NO: 384, SEQ ID NO: 385, SEQ ID NO: 386, SEQ ID NO: 387, SEQ ID NO: 388, SEQ ID NO: 389, SEQ ID NO: 390, SEQ ID NO: 391, SEQ ID NO: 392, SEQ ID NO: 393, SEQ ID NO: 394, SEQ ID NO: 395, SEQ ID NO: 396, SEQ ID NO: 397, SEQ ID NO: 398, SEQ ID NO: 399, SEQ ID NO: 400, SEQ ID NO: 401, SEQ ID NO: 402, SEQ ID NO: 403, SEQ ID NO: 404, SEQ ID NO: 405, SEQ ID NO: 406, SEQ ID NO: 407, SEQ ID NO: 408, SEQ ID NO: 409, SEQ ID NO: 410, SEQ ID NO: 411, SEQ ID NO: 412, SEQ ID NO: 413, SEQ ID NO: 414, SEQ ID NO: 415, SEQ ID NO: 416, SEQ ID NO: 417, SEQ ID NO: 418, SEQ ID NO: 419, SEQ ID NO: 420, SEQ ID NO: 421, SEQ ID NO: 422, SEQ ID NO: 423, SEQ ID NO: 424, SEQ ID NO: 425, SEQ ID NO: 426, SEQ ID NO: 427, SEQ ID NO: 428, SEQ ID NO: 429, SEQ ID NO: 430, SEQ ID NO: 431, SEQ ID NO: 432, SEQ ID NO: 433, SEQ ID NO: 434, SEQ ID NO: 435, SEQ ID NO: 436, SEQ ID NO: 437, SEQ ID NO: 438, SEQ ID NO: 439, SEQ ID NO: 440, SEQ ID NO: 441, SEQ ID NO: 442, SEQ ID NO: 443, SEQ ID NO: 444, SEQ ID NO: 445, SEQ ID NO: 446, SEQ ID NO: 447, SEQ ID NO: 448, SEQ ID NO: 449, SEQ ID NO: 450, SEQ ID NO: 451 or SEQ ID NO: 452 having 1, 2, 3, 4, 5, 6, 7, 8, 9, 10 11, 12, 13, 14, 15, 16, 17, 18, 19, 20, 21, 22, 23, 24, 25, 26, 27, 28, 29, 30, 31, 32, 33, 34, 35, 36, 37, 38, 39, 40 or more amino acid substitutions compared to the native amino acid at the corresponding position of SEQ ID NO: 377, SEQ ID NO: 378, SEQ ID NO: 379, SEQ ID NO: 380, SEQ ID NO: 381, SEQ ID NO: 382, SEQ ID NO: 383, SEQ ID NO: 384, SEQ ID NO: 385, SEQ ID NO: 386, SEQ ID NO: 387, SEQ ID NO: 388, SEQ ID NO: 389, SEQ ID NO: 390, SEQ ID NO: 391, SEQ ID NO: 392, SEQ ID NO: 393, SEQ ID NO: 394, SEQ ID NO: 395, SEQ ID NO: 396, SEQ ID NO: 397, SEQ ID NO: 398, SEQ ID NO: 399, SEQ ID NO: 400, SEQ ID NO: 401, SEQ ID NO: 402, SEQ ID NO: 403, SEQ ID NO: 404, SEQ ID NO: 405, SEQ ID NO: 406, SEQ ID NO: 407, SEQ ID NO: 408, SEQ ID NO: 409, SEQ ID NO: 410, SEQ ID NO: 411, SEQ ID NO: 412, SEQ ID NO: 413, SEQ ID NO: 414, SEQ ID NO: 415, SEQ ID NO: 416, SEQ ID NO: 417, SEQ ID NO: 418, SEQ ID NO: 419, SEQ ID NO: 420, SEQ ID NO: 421, SEQ ID NO: 422, SEQ ID NO: 423, SEQ ID NO: 424, SEQ ID NO: 425, SEQ ID NO: 426, SEQ ID NO: 427, SEQ ID NO: 428, SEQ ID NO: 429, SEQ ID NO: 430, SEQ ID NO: 431, SEQ ID NO: 432, SEQ ID NO: 433, SEQ ID NO: 434, SEQ ID NO: 435, SEQ ID NO: 436, SEQ ID NO: 437, SEQ ID NO: 438, SEQ ID NO: 439, SEQ ID NO: 440, SEQ ID NO: 441, SEQ ID NO: 442, SEQ ID NO: 443, SEQ ID NO: 444, SEQ ID NO: 445, SEQ ID NO: 446, SEQ ID NO: 447, SEQ ID NO: 448, SEQ ID NO: 449, SEQ ID NO: 450, SEQ ID NO: 451 or SEQ ID NO: 452.

[0117] In some embodiments, the IPD107 polypeptide comprises the amino acid sequence of SEQ ID NO: 377, SEQ ID NO: 378, SEQ ID NO: 379, SEQ ID NO: 380, SEQ ID NO: 381, SEQ ID NO: 382, SEQ ID NO: 383, SEQ ID NO: 384, SEQ ID NO: 385, SEQ ID NO: 386, SEQ ID NO: 387, SEQ ID NO: 388, SEQ ID NO: 389, SEQ ID NO: 390, SEQ ID NO: 391, SEQ ID NO: 392, SEQ ID NO: 393, SEQ ID NO: 394, SEQ ID NO: 395, SEQ ID NO: 396, SEQ ID NO: 397, SEQ ID NO: 398, SEQ ID NO: 399, SEQ ID NO: 400, SEQ ID NO: 401, SEQ ID NO: 402, SEQ ID NO: 403, SEQ ID NO: 404, SEQ ID NO: 405, SEQ ID NO: 406, SEQ ID NO: 407, SEQ ID NO: 408, SEQ ID NO: 409, SEQ ID NO: 410, SEQ ID NO: 411, SEQ ID NO: 412, SEQ ID NO: 413, SEQ ID NO: 414, SEQ ID NO: 415, SEQ ID NO: 416, SEQ ID NO: 417, SEQ ID NO: 418, SEQ ID NO: 419, SEQ ID NO: 420, SEQ ID NO: 421, SEQ ID NO: 422, SEQ ID NO: 423, SEQ ID NO: 424, SEQ ID NO: 425, SEQ ID NO: 426, SEQ ID NO: 427, SEQ ID NO: 428, SEQ ID NO: 429, SEQ ID NO: 430, SEQ ID NO: 431, SEQ ID NO: 432, SEQ ID NO: 433, SEQ ID NO: 434, SEQ ID NO: 435, SEQ ID NO: 436, SEQ ID NO: 437, SEQ ID NO: 438, SEQ ID NO: 439, SEQ ID NO: 440, SEQ ID NO: 441, SEQ ID NO: 442, SEQ ID NO: 443, SEQ ID NO: 444, SEQ ID NO: 445, SEQ ID NO: 446, SEQ ID NO: 447, SEQ ID NO: 448, SEQ ID NO: 449, SEQ ID NO: 450, SEQ ID NO: 451 or SEQ ID NO: 452.

[0118] In some embodiments, the IPD107 polypeptide comprises the amino acid sequence of SEQ ID NO: 377, SEQ ID NO: 378, SEQ ID NO: 381, SEQ ID NO: 382, SEQ ID NO: 384, SEQ ID NO: 386, SEQ ID NO: 387, SEQ ID NO: 388, SEQ ID NO: 389, SEQ ID NO: 390, SEQ ID NO: 391, SEQ ID NO: 393, SEQ ID NO: 396, SEQ ID NO: 397, SEQ ID NO: 398, SEQ ID NO: 400, SEQ ID NO: 401, SEQ ID NO: 402, SEQ ID NO: 403, SEQ ID NO: 404, SEQ ID NO: 405, SEQ ID NO: 407, SEQ ID NO: 409, SEQ ID NO: 410, SEQ ID NO: 411, SEQ ID NO: 412, SEQ ID NO: 413, SEQ ID NO: 414, SEQ ID NO: 415, SEQ ID NO: 417, SEQ ID NO: 418, SEQ ID NO: 419, SEQ ID NO: 420, SEQ ID NO: 421, SEQ ID NO: 422, SEQ ID NO: 426, SEQ ID NO: 427, SEQ ID NO: 428, SEQ ID NO: 429, SEQ ID NO: 430, SEQ ID NO: 431, SEQ ID NO: 432, SEQ ID NO: 433, SEQ ID NO: 434, SEQ ID NO: 435, SEQ ID NO: 438, SEQ ID NO: 439, SEQ ID NO: 440, SEQ ID NO: 442, SEQ ID NO: 443, SEQ ID NO: 445, SEQ ID NO: 446, SEQ ID NO: 451 or SEQ ID NO: 452.

### IPD111 Proteins and Variants and Fragments Thereof

[0119] IPD111 polypeptides are encompassed by the disclosure. “IPD111 polypeptide”, and

[0120] “IPD111 protein” as used herein interchangeably refers to a polypeptide having insecticidal activity against one or more insect pests of the Lepidoptera and/or Coleoptera orders including but not limited to Western corn rootworm (WCRW), and is sufficiently homologous to the IPD111 polypeptide of SEQ ID NO: 453. A variety of IPD111 polypeptide homologs are contemplated. Sources of IPD111 polypeptide homologs or related proteins include bacterial species selected from but not limited to Pseudomonas species, Chromobacterium species, and Burkholderia species. Alignment of the amino acid sequences of IPD111 polypeptide homologs allows for the identification of residues that are highly conserved amongst the natural homologs of this family. IPD111 homologs can be aligned in a similar manner as shown in FIGS. 1 and 2 for IPD092-1 and IPD092-2 homologs, to identify conserved amino acid positions, positions tolerant to change, motifs, and domains.

[0121] In some embodiments, the sequence homology is against the full-length sequence of an IPD111 polypeptide. In some embodiments, the IPD111 polypeptide has at least about 40%, 45%, 50%, 51%, 52%, 53%, 54%, 55%, 56%, 57%, 58%, 59%, 60%, 61%, 62%, 63%, 64%, 65%, 66%, 67%, 68%, 69%, 70%, 71%, 72%, 73%, 74%, 75%, 76%, 77%, 78%, 79%, 80%, 81%, 82%, 83%, 84%, 85%, 86%, 87%, 88%, 89%, 90%, 91%, 92%, 93%, 94%, 95%, 96%, 97%, 98%, 99% or greater sequence identity compared to SEQ ID NO: 453, SEQ ID NO: 454, SEQ ID NO: 455, SEQ ID NO: 456, SEQ ID NO: 457, SEQ ID NO: 458, SEQ ID NO: 459, SEQ ID NO: 460, SEQ ID NO: 461, SEQ ID NO: 462, SEQ ID NO: 463, SEQ ID NO: 464, SEQ ID NO: 465, SEQ ID NO: 466, SEQ ID NO: 467, SEQ ID NO: 468, SEQ ID NO: 469, SEQ ID NO: 470, SEQ ID NO: 471, SEQ ID NO: 472, SEQ ID NO: 473, SEQ ID NO: 474, SEQ ID NO: 475, SEQ ID NO: 476, SEQ ID NO: 477, SEQ ID NO: 478, SEQ ID NO: 479, SEQ ID NO: 480, SEQ ID NO: 481, SEQ ID NO: 482, SEQ ID NO: 483, SEQ ID NO: 484, SEQ ID NO: 485, SEQ ID NO: 486, SEQ ID NO: 487, SEQ ID NO: 488, SEQ ID NO: 489, SEQ ID NO: 490, SEQ ID NO: 491, SEQ ID NO: 492, SEQ ID NO: 493, SEQ ID NO: 494, SEQ ID NO: 495, SEQ ID NO: 496, SEQ ID NO: 497, SEQ ID NO: 498, SEQ ID NO: 499, SEQ ID NO: 500, SEQ ID NO: 501, SEQ ID NO: 502, SEQ ID NO: 503, SEQ ID NO: 504, SEQ ID NO: 505, SEQ ID NO: 506, SEQ ID NO: 507, SEQ ID NO: 508, SEQ ID NO: 509, SEQ ID NO: 510, SEQ ID NO: 511, SEQ ID NO: 512, SEQ ID NO: 513, SEQ ID NO: 514, SEQ ID NO: 515, SEQ ID NO: 516, SEQ ID NO: 517, SEQ ID NO: 518, SEQ ID NO: 519, SEQ ID NO: 520, SEQ ID NO: 521, SEQ ID NO: 522, SEQ ID NO: 523, SEQ ID NO: 524, SEQ ID NO: 525, SEQ ID NO: 526, SEQ ID NO: 527 or SEQ ID NO: 528.

[0122] In some embodiments an IPD111 polypeptide comprises an amino acid sequence having at least about 70%, 71%, 72%, 73%, 74%, 75%, 76%, 77%, 78%, 79%, 80%, 81%, 82%, 83%, 84%, 85%, 86%, 87%, 88%, 89%, 90%, 91%, 92%, 93%, 94%, 95%, 96%, 97%, 98%, 99% or greater identity across the entire length of the amino acid sequence of SEQ ID NO: 453, SEQ ID NO: 454, SEQ ID NO: 455, SEQ ID NO: 456, SEQ ID NO: 457, SEQ ID NO: 458, SEQ ID NO: 459, SEQ ID NO: 460, SEQ ID NO: 461, SEQ ID NO: 462, SEQ ID NO: 463, SEQ ID NO: 464, SEQ ID NO: 465, SEQ ID NO: 466, SEQ ID NO: 467, SEQ ID NO: 468, SEQ ID NO: 469, SEQ ID NO: 470, SEQ ID NO: 471, SEQ ID NO: 472, SEQ ID NO: 473, SEQ ID NO: 474, SEQ ID NO: 475, SEQ ID NO: 476, SEQ ID NO: 477, SEQ ID NO: 478, SEQ ID NO: 479, SEQ ID NO: 480, SEQ ID NO: 481, SEQ ID NO: 482, SEQ ID NO: 483, SEQ ID NO: 484, SEQ ID NO: 485, SEQ ID NO: 486, SEQ ID NO: 487, SEQ ID NO: 488, SEQ ID NO: 489, SEQ ID NO: 490, SEQ ID NO: 491, SEQ ID NO: 492, SEQ ID NO: 493, SEQ ID NO: 494, SEQ ID NO: 495, SEQ ID NO: 496, SEQ ID NO: 497, SEQ ID NO: 498, SEQ ID NO: 499, SEQ ID NO: 500, SEQ ID NO: 501, SEQ ID NO: 502, SEQ ID NO: 503, SEQ ID NO: 504, SEQ ID NO: 505, SEQ ID NO: 506, SEQ ID NO: 507, SEQ ID NO: 508, SEQ ID NO: 509, SEQ ID NO: 510, SEQ ID NO: 511, SEQ ID NO: 512, SEQ ID NO: 513, SEQ ID NO: 514, SEQ ID NO: 515, SEQ ID NO: 516, SEQ ID NO: 517, SEQ ID NO: 518, SEQ ID NO: 519, SEQ ID NO: 520, SEQ ID NO: 521, SEQ ID NO: 522, SEQ ID NO: 523, SEQ ID NO: 524, SEQ ID NO: 525, SEQ ID NO: 526, SEQ ID NO: 527 or SEQ ID NO: 528.

[0123] In some embodiments an IPD111 polypeptide comprises an amino acid sequence having at least 95%, 95.5% 96%, 96.5%, 97%, 97%.5%, 98%, 98.1%, 98.2%, 98.3%, 98.4%, 98.5%, 98.6%, 98.7%, 98.8%, 98.9%, 99%, 99.1%, 99.2%, 99.3%, 99.4%, 99.5%, 99.6%, 99.7%, 99.8%, 99.9% or greater identity across the entire length of the amino acid sequence of SEQ ID NO: 453, SEQ ID NO: 454, SEQ ID NO: 455, SEQ ID NO: 456, SEQ ID NO: 462, SEQ ID NO: 463, SEQ ID NO: 465, SEQ ID NO: 466, SEQ ID NO: 467, SEQ ID NO: 468, SEQ ID NO: 469, SEQ ID NO: 470, SEQ ID NO: 471, SEQ ID NO: 472, SEQ ID NO: 473, SEQ ID NO: 474, SEQ ID NO: 475, SEQ ID NO: 476, SEQ ID NO: 478, SEQ ID NO: 479, SEQ ID NO: 489, SEQ ID NO: 496, SEQ ID NO: 497, SEQ ID NO: 498, SEQ ID NO: 499, SEQ ID NO: 500, SEQ ID NO: 501, SEQ ID NO: 502, SEQ ID NO: 503, SEQ ID NO: 504, SEQ ID NO: 505, SEQ ID NO: 506, SEQ ID NO: 507, SEQ ID NO: 508, SEQ ID NO: 509, SEQ ID NO: 510, SEQ ID NO: 511, SEQ ID NO: 512, SEQ ID NO: 513, SEQ ID NO: 514, SEQ ID NO: 515, SEQ ID NO: 516, SEQ ID NO: 517, SEQ ID NO: 518, SEQ ID NO: 519, SEQ ID NO: 520, SEQ ID NO: 521, SEQ ID NO: 522, SEQ ID NO: 523, SEQ ID NO: 524 or SEQ ID NO: 526.

[0124] In some embodiments an IPD111 polypeptide comprises an amino acid sequence of SEQ ID NO: 453, SEQ ID NO: 454, SEQ ID NO: 455, SEQ ID NO: 456, SEQ ID NO: 457, SEQ ID NO: 458, SEQ ID NO: 459, SEQ ID NO: 460, SEQ ID NO: 461, SEQ ID NO: 462, SEQ ID NO: 463, SEQ ID NO: 464, SEQ ID NO: 465, SEQ ID NO: 466, SEQ ID NO: 467, SEQ ID NO: 468, SEQ ID NO: 469, SEQ ID NO: 470, SEQ ID NO: 471, SEQ ID NO: 472, SEQ ID NO: 473, SEQ ID NO: 474, SEQ ID NO: 475, SEQ ID NO: 476, SEQ ID NO: 477, SEQ ID NO: 478, SEQ ID NO: 479, SEQ ID NO: 480, SEQ ID NO: 481, SEQ ID NO: 482, SEQ ID NO: 483, SEQ ID NO: 484, SEQ ID NO: 485, SEQ ID NO: 486, SEQ ID NO: 487, SEQ ID NO: 488, SEQ ID NO: 489, SEQ ID NO: 490, SEQ ID NO: 491, SEQ ID NO: 492, SEQ ID NO: 493, SEQ ID NO: 494, SEQ ID NO: 495, SEQ ID NO: 496, SEQ ID NO: 497, SEQ ID NO: 498, SEQ ID NO: 499, SEQ ID NO: 500, SEQ ID NO: 501, SEQ ID NO: 502, SEQ ID NO: 503, SEQ ID NO: 504, SEQ ID NO: 505, SEQ ID NO: 506, SEQ ID NO: 507, SEQ ID NO: 508, SEQ ID NO: 509, SEQ ID NO: 510, SEQ ID NO: 511, SEQ ID NO: 512, SEQ ID NO: 513, SEQ ID NO: 514, SEQ ID NO: 515, SEQ ID NO: 516, SEQ ID NO: 517, SEQ ID NO: 518, SEQ ID NO: 519, SEQ ID NO: 520, SEQ ID NO: 521, SEQ ID NO: 522, SEQ ID NO: 523, SEQ ID NO: 524, SEQ ID NO: 525, SEQ ID NO: 526, SEQ ID NO: 527 or SEQ ID NO: 528 having 1, 2, 3, 4, 5, 6, 7, 8, 9, 10 11, 12, 13, 14, 15, 16, 17, 18, 19, 20, 21, 22, 23, 24, 25, 26, 27, 28, 29, 30, 31, 32, 33, 34, 35, 36, 37, 38, 39, 40, 41, 42, 43, 44, 45, 46, 47, 48, 49, 50, 51, 52, 53, 54, 55, 56, 57, 58, 59, 60, 61, 62, 63, 64, 65, 66, 67, 68, 69, 70, 71, 72, 73, 74, 75, 76, 77, 78, 79, 80, 81, 82, 83, 84, 85, 86, 87, 88, 89, 90 or more amino acid substitutions compared to the native amino acid at the corresponding position of SEQ ID NO: 453, SEQ ID NO: 454, SEQ ID NO: 455, SEQ ID NO: 456, SEQ ID NO: 457, SEQ ID NO: 458, SEQ ID NO: 459, SEQ ID NO: 460, SEQ ID NO: 461, SEQ ID NO: 462, SEQ ID NO: 463, SEQ ID NO: 464, SEQ ID NO: 465, SEQ ID NO: 466, SEQ ID NO: 467, SEQ ID NO: 468, SEQ ID NO: 469, SEQ ID NO: 470, SEQ ID NO: 471, SEQ ID NO: 472, SEQ ID NO: 473, SEQ ID NO: 474, SEQ ID NO: 475, SEQ ID NO: 476, SEQ ID NO: 477, SEQ ID NO: 478, SEQ ID NO: 479, SEQ ID NO: 480, SEQ ID NO: 481, SEQ ID NO: 482, SEQ ID NO: 483, SEQ ID NO: 484, SEQ ID NO: 485, SEQ ID NO: 486, SEQ ID NO: 487, SEQ ID NO: 488, SEQ ID NO: 489, SEQ ID NO: 490, SEQ ID NO: 491, SEQ ID NO: 492, SEQ ID NO: 493, SEQ ID NO: 494, SEQ ID NO: 495, SEQ ID NO: 496, SEQ ID NO: 497, SEQ ID NO: 498, SEQ ID NO: 499, SEQ ID NO: 500, SEQ ID NO: 501, SEQ ID NO: 502, SEQ ID NO: 503, SEQ ID NO: 504, SEQ ID NO: 505, SEQ ID NO: 506, SEQ ID NO: 507, SEQ ID NO: 508, SEQ ID NO: 509, SEQ ID NO: 510, SEQ ID NO: 511, SEQ ID NO: 512, SEQ ID NO: 513, SEQ ID NO: 514, SEQ ID NO: 515, SEQ ID NO: 516, SEQ ID NO: 517, SEQ ID NO: 518, SEQ ID NO: 519, SEQ ID NO: 520, SEQ ID NO: 521, SEQ ID NO: 522, SEQ ID NO: 523, SEQ ID NO: 524, SEQ ID NO: 525, SEQ ID NO: 526, SEQ ID NO: 527 or SEQ ID NO: 528.

[0125] In some embodiments, the IPD111 polypeptide comprises the amino acid sequence of SEQ ID NO: 453, SEQ ID NO: 454, SEQ ID NO: 455, SEQ ID NO: 456, SEQ ID NO: 457, SEQ ID NO: 458, SEQ ID NO: 459, SEQ ID NO: 460, SEQ ID NO: 461, SEQ ID NO: 462, SEQ ID NO: 463, SEQ ID NO: 464, SEQ ID NO: 465, SEQ ID NO: 466, SEQ ID NO: 467, SEQ ID NO: 468, SEQ ID NO: 469, SEQ ID NO: 470, SEQ ID NO: 471, SEQ ID NO: 472, SEQ ID NO: 473, SEQ ID NO: 474, SEQ ID NO: 475, SEQ ID NO: 476, SEQ ID NO: 477, SEQ ID NO: 478, SEQ ID NO: 479, SEQ ID NO: 480, SEQ ID NO: 481, SEQ ID NO: 482, SEQ ID NO: 483, SEQ ID NO: 484, SEQ ID NO: 485, SEQ ID NO: 486, SEQ ID NO: 487, SEQ ID NO: 488, SEQ ID NO: 489, SEQ ID NO: 490, SEQ ID NO: 491, SEQ ID NO: 492, SEQ ID NO: 493, SEQ ID NO: 494, SEQ ID NO: 495, SEQ ID NO: 496, SEQ ID NO: 497, SEQ ID NO: 498, SEQ ID NO: 499, SEQ ID NO: 500, SEQ ID NO: 501, SEQ ID NO: 502, SEQ ID NO: 503, SEQ ID NO: 504, SEQ ID NO: 505, SEQ ID NO: 506, SEQ ID NO: 507, SEQ ID NO: 508, SEQ ID NO: 509, SEQ ID NO: 510, SEQ ID NO: 511, SEQ ID NO: 512, SEQ ID NO: 513, SEQ ID NO: 514, SEQ ID NO: 515, SEQ ID NO: 516, SEQ ID NO: 517, SEQ ID NO: 518, SEQ ID NO: 519, SEQ ID NO: 520, SEQ ID NO: 521, SEQ ID NO: 522, SEQ ID NO: 523, SEQ ID NO: 524, SEQ ID NO: 525, SEQ ID NO: 526, SEQ ID NO: 527 or SEQ ID NO: 528.

[0126] In some embodiments, the IPD111 polypeptide comprises the amino acid sequence of SEQ ID NO: 453, SEQ ID NO: 454, SEQ ID NO: 455, SEQ ID NO: 456, SEQ ID NO: 462, SEQ ID NO: 463, SEQ ID NO: 465, SEQ ID NO: 466, SEQ ID NO: 467, SEQ ID NO: 468, SEQ ID NO: 469, SEQ ID NO: 470, SEQ ID NO: 471, SEQ ID NO: 472, SEQ ID NO: 473, SEQ ID NO: 474, SEQ ID NO: 475, SEQ ID NO: 476, SEQ ID NO: 478, SEQ ID NO: 479, SEQ ID NO: 489, SEQ ID NO: 496, SEQ ID NO: 497, SEQ ID NO: 498, SEQ ID NO: 499, SEQ ID NO: 500, SEQ ID NO: 501, SEQ ID NO: 502, SEQ ID NO: 503, SEQ ID NO: 504, SEQ ID NO: 505, SEQ ID NO: 506, SEQ ID NO: 507, SEQ ID NO: 508, SEQ ID NO: 509, SEQ ID NO: 510, SEQ ID NO: 511, SEQ ID NO: 512, SEQ ID NO: 513, SEQ ID NO: 514, SEQ ID NO: 515, SEQ ID NO: 516, SEQ ID NO: 517, SEQ ID NO: 518, SEQ ID NO: 519, SEQ ID NO: 520, SEQ ID NO: 521, SEQ ID NO: 522, SEQ ID NO: 523, SEQ ID NO: 524 or SEQ ID NO: 526.

### IPD112 Proteins and Variants and Fragments Thereof

[0127] IPD112 polypeptides are encompassed by the disclosure. “IPD112 polypeptide”, and “IPD112 protein” as used herein interchangeably refers to a polypeptide having insecticidal activity against one or more insect pests of the Lepidoptera and/or Coleoptera orders including but not limited to Western corn rootworm (WCRW), and is sufficiently homologous to the IPD112 polypeptide of SEQ ID NO: 529. A variety of IPD112 polypeptide homologs are contemplated. Sources of IPD112 polypeptide homologs or related proteins include bacterial species selected from but not limited to Pseudomonas species and Hafnia species. Alignment of the amino acid sequences of IPD112 polypeptide homologs allows for the identification of residues that are highly conserved amongst the natural homologs of this family. IPD112 homologs can be aligned in a similar manner as shown in FIGS. 1 and 2 for IPD092-1 and IPD092-2 homologs, to identify conserved amino acid positions, positions tolerant to change, motifs, and domains.

[0128] In some embodiments, the sequence homology is against the full-length sequence of an IPD112 polypeptide. In some embodiments, the IPD112 polypeptide has at least about 40%, 45%, 50%, 51%, 52%, 53%, 54%, 55%, 56%, 57%, 58%, 59%, 60%, 61%, 62%, 63%, 64%, 65%, 66%, 67%, 68%, 69%, 70%, 71%, 72%, 73%, 74%, 75%, 76%, 77%, 78%, 79%, 80%, 81%, 82%, 83%, 84%, 85%, 86%, 87%, 88%, 89%, 90%, 91%, 92%, 93%, 94%, 95%, 96%, 97%, 98%, 99% or greater sequence identity compared to SEQ ID NO: 529, SEQ ID NO: 530, SEQ ID NO: 531, SEQ ID NO: 532, SEQ ID NO: 533, SEQ ID NO: 534, SEQ ID NO: 535, SEQ ID NO: 536, SEQ ID NO: 537, SEQ ID NO: 538, SEQ ID NO: 539, SEQ ID NO: 540, SEQ ID NO: 541, SEQ ID NO: 542, SEQ ID NO: 543, SEQ ID NO: 544 or SEQ ID NO: 545.

[0129] In some embodiments an IPD112 polypeptide comprises an amino acid sequence having at least about 70%, 71%, 72%, 73%, 74%, 75%, 76%, 77%, 78%, 79%, 80%, 81%, 82%, 83%, 84%, 85%, 86%, 87%, 88%, 89%, 90%, 91%, 92%, 93%, 94%, 95%, 96%, 97%, 98%, 99% or greater identity across the entire length of the amino acid sequence of SEQ ID NO: 529, SEQ ID NO: 530, SEQ ID NO: 531, SEQ ID NO: 532, SEQ ID NO: 533, SEQ ID NO: 534, SEQ ID NO: 535, SEQ ID NO: 536, SEQ ID NO: 537, SEQ ID NO: 538, SEQ ID NO: 539, SEQ ID NO: 540, SEQ ID NO: 541, SEQ ID NO: 542, SEQ ID NO: 543, SEQ ID NO: 544 or SEQ ID NO: 545.

[0130] In some embodiments an IPD112 polypeptide comprises an amino acid sequence having at least 95%, 95.5% 96%, 96.5%, 97%, 97%.5%, 98%, 98.1%, 98.2%, 98.3%, 98.4%, 98.5%, 98.6%, 98.7%, 98.8%, 98.9%, 99%, 99.1%, 99.2%, 99.3%, 99.4%, 99.5%, 99.6%, 99.7%, 99.8%, 99.9% or greater identity across the entire length of the amino acid sequence of SEQ ID NO: 529, SEQ ID NO: 530, SEQ ID NO: 531, SEQ ID NO: 532, SEQ ID NO: 534, SEQ ID NO: 537 or SEQ ID NO: 545.

[0131] In some embodiments an IPD112 polypeptide comprises an amino acid sequence of SEQ ID NO: 529, SEQ ID NO: 530, SEQ ID NO: 531, SEQ ID NO: 532, SEQ ID NO: 533, SEQ ID NO: 534, SEQ ID NO: 535, SEQ ID NO: 536, SEQ ID NO: 537, SEQ ID NO: 538, SEQ ID NO: 539, SEQ ID NO: 540, SEQ ID NO: 541, SEQ ID NO: 542, SEQ ID NO: 543, SEQ ID NO: 544 or SEQ ID NO: 545 having 1, 2, 3, 4, 5, 6, 7, 8, 9, 10 11, 12, 13, 14, 15, 16, 17, 18, 19, 20, 21, 22, 23, 24, 25, 26, 27, 28, 29, 30, 31, 32, 33, 34, 35, 36, 37, 38, 39, 40, 41, 42, 43, 44, 45, 46, 47, 48, 49, 50, 51, 52, 53, 54, 55, 56, 57, 58, 59, 60, 61, 62, 63, 64, 65, 66, 67, 68, 69, 70, 71, 72, 73, 74, 75, 76, 77, 78, 79, 80, 81, 82, 83, 84, 85, 86, 87, 88, 89, 90 or more amino acid substitutions compared to the native amino acid at the corresponding position of SEQ ID NO: 529, SEQ ID NO: 530, SEQ ID NO: 531, SEQ ID NO: 532, SEQ ID NO: 533, SEQ ID NO: 534, SEQ ID NO: 535, SEQ ID NO: 536, SEQ ID NO: 537, SEQ ID NO: 538, SEQ ID NO: 539, SEQ ID NO: 540, SEQ ID NO: 541, SEQ ID NO: 542, SEQ ID NO: 543, SEQ ID NO: 544 or SEQ ID NO: 545.

[0132] In some embodiments, the IPD112 polypeptide comprises the amino acid sequence of SEQ ID NO: 529, SEQ ID NO: 530, SEQ ID NO: 531, SEQ ID NO: 532, SEQ ID NO: 533, SEQ ID NO: 534, SEQ ID NO: 535, SEQ ID NO: 536, SEQ ID NO: 537, SEQ ID NO: 538, SEQ ID NO: 539, SEQ ID NO: 540, SEQ ID NO: 541, SEQ ID NO: 542, SEQ ID NO: 543, SEQ ID NO: 544 or SEQ ID NO: 545.

[0133] In some embodiments, the IPD112 polypeptide comprises the amino acid sequence of SEQ ID NO: 529, SEQ ID NO: 530, SEQ ID NO: 531, SEQ ID NO: 532, SEQ ID NO: 534, SEQ ID NO: 537 or SEQ ID NO: 545.

[0134] As used herein, the terms “protein,” “peptide molecule,” or “polypeptide” includes any molecule that comprises five or more amino acids. Protein, peptide or polypeptide molecules may undergo modification, including post-translational modifications, such as, but not limited to, disulfide bond formation, glycosylation, phosphorylation or oligomerization. Thus, as used herein, the terms “protein,” “peptide molecule” or “polypeptide” includes any protein that is modified by any biological or non-biological process. The terms “amino acid” and “amino acids” refer to all naturally occurring L-amino acids.

[0135] A “recombinant protein” is used herein to refer to a protein that is no longer in its natural environment, for example in vitro or in a recombinant bacterial or plant host cell. A polypeptide of the disclosure that is substantially free of cellular material includes preparations of protein having less than about 30%, 20%, 10% or 5% (by dry weight) of non-pesticidal protein (also referred to herein as a “contaminating protein”).

[0136] “Fragments” or “biologically active portions” include polypeptide fragments comprising amino acid sequences sufficiently identical to polypeptides of the disclosure and that exhibit insecticidal activity. “Fragments” or “biologically active portions” of polypeptides of the disclosure includes fragments comprising amino acid sequences sufficiently identical to have insecticidal activity. Such biologically active portions can be prepared by recombinant techniques and evaluated for insecticidal activity. In some embodiments, the polypeptide fragment is an N-terminal and/or a C-terminal truncation of at least 1, 2, 3, 4, 5, 6, 7, 8, 9, 10, 11, 12, 13, 14, 15, 16, 17, 18, 19, 20, 21, 22, 23, 24, 25, 26, 27, 28, 29, 30, 31 or more amino acids from the N-terminus and/or C-terminus by proteolysis, by insertion of a start codon, by deletion of the codons encoding the deleted amino acids and concomitant insertion of a start codon, and/or insertion of a stop codon.

[0137] “Variants” as used herein refers to proteins or polypeptides having an amino acid sequence that is at least about 50%, 55%, 60%, 65%, 70%, 75%, 80%, 81%, 82%, 83%, 84%, 85%, 86%, 87%, 88%, 89%, 90%, 91%, 92%, 93%, 94%, 95%, 96%, 97%, 98%, 99% or greater identical to the parental amino acid sequence.

[0138] Amino acid sequence variants of a polypeptide of the disclosure can be prepared by mutations in the DNA. This may also be accomplished by one of several forms of mutagenesis and/or in directed evolution. In some aspects, the changes encoded in the amino acid sequence will not substantially affect the function of the protein. Such variants will possess the desired pesticidal activity. However, it is understood that the ability of a polypeptide to confer pesticidal activity may be improved using such techniques upon the compositions of this disclosure.

[0139] Variants may be made by making random mutations or the variants may be designed. In the case of designed mutants, there is a high probability of generating variants with similar activity to the native toxin when amino acid identity is maintained in critical regions of the toxin which account for biological activity or are involved in the determination of three-dimensional configuration which ultimately is responsible for the biological activity. A high probability of retaining activity will also occur if substitutions are conservative. Amino acids may be placed in the following classes: non-polar, uncharged polar, basic, and acidic. Conservative substitutions whereby an amino acid of one class is replaced with another amino acid of the same type are least likely to materially alter the biological activity of the variant. Table 1 provides a listing of examples of amino acids belonging to each class.

TABLE 1

| Class of Amino Acid | Examples of Amino Acids |
|---|---|
| Nonpolar Side Chains | Ala (A), Val (V), Leu (L), Ile (I), |
| | Pro (P), Met (M), Phe (F), Trp (W) |
| Uncharged Polar Side Chains | Gly (G), Ser (S), Thr (T), Cys (C), |
| | Tyr (Y), Asn (N), Gln (Q) |
| Acidic Side Chains | Asp (D), Glu (E) |
| Basic Side Chains | Lys (K), Arg (R), His (H) |
| Beta-branched Side Chains | Thr, Val, Ile |
| Aromatic Side Chains | Tyr, Phe, Trp, His |

[0140] Variant proteins encompassed by the disclosure are biologically active, that is they continue to possess the desired biological activity (i.e. pesticidal activity) of the native protein. In some embodiment, the variant will have at least about 10%, at least about 30%, at least about 50%, at least about 70%, at least about 80% or more of the insecticidal activity of the native protein. In some embodiments, the variants may have improved activity over the native protein.

[0141] Variant nucleotide and amino acid sequences of the disclosure also encompass sequences derived from mutagenic and recombinogenic procedures such as DNA shuffling. With such a procedure, one or more different polypeptide coding regions can be used to create a new polypeptide possessing the desired properties. In this manner, libraries of recombinant polynucleotides are generated from a population of related sequence polynucleotides comprising sequence regions that have substantial sequence identity and can be homologously recombined in vitro or in vivo. For example, using this approach, sequence motifs encoding a domain of interest may be shuffled between a pesticidal gene and other known pesticidal genes to obtain a new gene coding for a protein with an improved property of interest, such as an increased insecticidal activity. Strategies for such DNA shuffling can be found in Stemmer, (1994) Proc. Natl. Acad. Sci. USA 91:10747-10751; Stemmer, (1994) Nature 370:389-391; Crameri, et al., (1997) Nature Biotech. 15:436-438; Moore, et al., (1997) J. Mol. Biol. 272:336-347; Zhang, et al., (1997) Proc. Natl. Acad. Sci. USA 94:4504-4509; Crameri, et al., (1998) Nature 391:288-291; and U.S. Pat. Nos. 5,605,793 and 5,837,458.

[0142] Domain swapping or shuffling is another mechanism for generating altered polypeptides. Domains may be swapped between polypeptides resulting in hybrid or chimeric toxins with improved insecticidal activity or target spectrum. Methods for generating recombinant proteins and testing them for pesticidal activity can be found in Naimov, et al., (2001) Appl. Environ. Microbiol. 67:5328-5330; de Maagd, et al., (1996) Appl. Environ. Microbiol. 62:1537-1543; Ge, et al., (1991) J. Biol. Chem. 266:17954-17958; Schnepf, et al., (1990) J. Biol. Chem. 265:20923-20930; Rang, et al., 91999) Appl. Environ. Microbiol. 65:2918-2925).

[0143] A sequence and structure analysis method can be employed, which is composed of four components: phylogenetic tree construction, protein sequence motifs finding, secondary structure prediction, and alignment of protein sequences and secondary structures. Details about each component are illustrated below.

[0144] 1) Phylogenetic Tree Construction

[0145] The phylogenetic analysis can be performed using the software MEGAS. Protein sequences can be subjected to ClustalW version 2 analysis (Larkin M. A et al (2007) Bioinformatics 23(21): 2947-2948) for multiple sequence alignment. The evolutionary history is then inferred by the Maximum Likelihood method based on the JTT matrix-based model. The tree with the highest log likelihood is obtained, exported in Newick format, and further processed to extract the sequence IDs in the same order as they appeared in the tree. A few clades representing sub-families can be manually identified for each insecticidal protein family.

[0146] 2) Protein Sequence Motifs Finding

[0147] Protein sequences are re-ordered according to the phylogenetic tree built previously, and fed to the MOTIF analysis tool MEME (Multiple EM for MOTIF Elicitation) (Bailey T. L., and Elkan C., Proceedings of the Second International Conference on Intelligent Systems for Molecular Biology, pp. 28-36, AAAI Press, Menlo Park, Calif., 1994.) for identification of key sequence motifs. MEME is setup as follows: Minimum number of sites 2, Minimum motif width 5, and Maximum number of motifs 30. Sequence motifs unique to each sub-family were identified by visual observation. The distribution of MOTIFs across the entire gene family could be visualized in HTML webpage. The MOTIFs are numbered relative to the ranking of the E-value for each MOTIF.

[0148] 3) Secondary Structure Prediction

[0149] PSIPRED, top ranked secondary structure prediction method (Jones D T. (1999) J. Mol. Biol. 292: 195-202), can be used for protein secondary structure prediction. The tool provides accurate structure prediction using two feed-forward neural networks based on the PSI-BLAST output. The PSI-BLAST database is created by removing low-complexity, transmembrane, and coiled-coil regions in Uniref100. The PSIPRED results contain the predicted secondary structures (Alpha helix: H, Beta strand: E, and Coil: C) and the corresponding confidence scores for each amino acid in a given protein sequence.

[0150] 4) Alignment of Protein Sequences and Secondary Structures

[0151] A script can be developed to generate gapped secondary structure alignment according to the multiple protein sequence alignment from step 1 for all proteins. All aligned protein sequences and structures are concatenated into a single FASTA file, and then imported into MEGA for visualization and identification of conserved structures.

[0152] In some embodiments, the polypeptides of the disclosure have a modified physical property. As used herein, the term “physical property” refers to any parameter suitable for describing the physical-chemical characteristics of a protein. As used herein, “physical property of interest” and “property of interest” are used interchangeably to refer to physical properties of proteins that are being investigated and/or modified. Examples of physical properties include, but are not limited to, net surface charge and charge distribution on the protein surface, net hydrophobicity and hydrophobic residue distribution on the protein surface, surface charge density, surface hydrophobicity density, total count of surface ionizable groups, surface tension, protein size and its distribution in solution, melting temperature, heat capacity, and second virial coefficient. Examples of physical properties also include, polypeptides having increased expression, increased solubility, decreased phytotoxicity, and digestibility of proteolytic fragments in an insect gut. Models for digestion by simulated gastric fluids can be found in Fuchs, R. L. and J. D. Astwood. Food Technology 50: 83-88, 1996; Astwood, J. D., et al Nature Biotechnology 14: 1269-1273, 1996; Fu T J et al J. Agric Food Chem. 50: 7154-7160, 2002).

[0153] In some embodiments variants include polypeptides that differ in amino acid sequence due to mutagenesis. Variant proteins encompassed by the disclosure are biologically active, that is they continue to possess the desired biological activity (i.e. pesticidal activity) of the native protein. In some embodiments, the variant will have at least about 10%, at least about 30%, at least about 50%, at least about 70%, at least about 80% or more of the insecticidal activity of the native protein. In some embodiments, the variants may have improved activity over the native protein.

[0154] Bacterial genes quite often possess multiple methionine initiation codons in proximity to the start of the open reading frame. Often, translation initiation at one or more of these start codons will lead to generation of a functional protein. These start codons can include ATG codons. However, bacteria such as Bacillus sp. also recognize the codon GTG as a start codon, and proteins that initiate translation at GTG codons contain a methionine at the first amino acid. On rare occasions, translation in bacterial systems can initiate at a TTG codon, though in this event the TTG encodes a methionine. Furthermore, it is not often determined a priori which of these codons are used naturally in the bacterium. Thus, it is understood that use of one of the alternate methionine codons may also lead to generation of pesticidal proteins. These pesticidal proteins are encompassed in the present disclosure and may be used in the methods of the present disclosure. It will be understood that, when expressed in plants, it will be necessary to alter the alternate start codon to ATG for proper translation.

[0155] In some embodiments, chimeric polypeptides are provided comprising regions of at least two different IPD092-1 polypeptides, IPD092-2 polypeptides, IPD095-1 polypeptides, IPD095-2 polypeptides, IPD097 polypeptides, IPD099-1 polypeptides, IPD099-2 polypeptides, IPD099-3 polypeptides, IPD100-1 polypeptides, IPD100-2 polypeptides, IPD105 polypeptides, IPD106-1 polypeptides, IPD106-2 polypeptides, IPD107 polypeptides, IPD111 polypeptides or IPD112 polypeptides are encompassed.

[0156] In some embodiments, chimeric IPD092-1 polypeptides, chimeric IPD092-2 polypeptides, chimeric IPD095-1 polypeptides, chimeric IPD095-2 polypeptides, chimeric IPD097 polypeptides, chimeric IPD099-1 polypeptides, chimeric IPD099-2 polypeptides, chimeric IPD099-3 polypeptides, chimeric IPD100-1 polypeptides, chimeric IPD100-2 polypeptides, chimeric IPD105 polypeptides, chimeric IPD106-1 polypeptides, chimeric IPD106-2 polypeptides, chimeric IPD107 polypeptides, chimeric IPD111 polypeptides or chimeric IPD112 polypeptides are provided comprising an N-terminal Region of a first IPD092-1 polypeptides, IPD092-2 polypeptides, IPD095-1 polypeptides, IPD095-2 polypeptides, IPD097 polypeptides, IPD099-1 polypeptides, IPD099-2 polypeptides, IPD099-3 polypeptides, IPD100-1 polypeptides, IPD100-2 polypeptides, IPD105 polypeptides, IPD106-1 polypeptides, IPD106-2 polypeptides, IPD107 polypeptides, IPD111 polypeptides or IPD112 polypeptides of the disclosure operably fused to a C-terminal Region of a second IPD092-1 polypeptides, IPD092-2 polypeptides, IPD095-1 polypeptides, IPD095-2 polypeptides, IPD097 polypeptides, IPD099-1 polypeptides, IPD099-2 polypeptides, IPD099-3 polypeptides, IPD100-1 polypeptides, IPD100-2 polypeptides, IPD105 polypeptides, IPD106-1 polypeptides, IPD106-2 polypeptides, IPD107 polypeptides, IPD111 polypeptides or IPD112 polypeptides of the disclosure.

[0157] In other embodiments, the polypeptides of the disclosure can be expressed as a precursor protein with an intervening sequence that catalyzes multi-step, post translational protein splicing. Protein splicing involves the excision of an intervening sequence from a polypeptide with the concomitant joining of the flanking sequences to yield a new polypeptide (Chong, et al., (1996) J. Biol. Chem., 271:22159-22168). This intervening sequence or protein splicing element, referred to as inteins, which catalyze their own excision through three coordinated reactions at the N-terminal and C-terminal splice junctions: an acyl rearrangement of the N-terminal cysteine or serine; a transesterfication reaction between the two termini to form a branched ester or thioester intermediate and peptide bond cleavage coupled to cyclization of the intein C-terminal asparagine to free the intein (Evans, et al., (2000) J. Biol. Chem., 275:9091-9094. In other embodiments, the polypeptides of the disclosure can be encoded by two separate genes where the intein of the precursor protein comes from the two genes, referred to as a split-intein, and the two portions of the precursor are joined by a peptide bond formation.

[0158] In some embodiments, the polypeptide of the disclosure is a circular permuted variant. The development of recombinant DNA methods has made it possible to study the effects of sequence transposition on protein folding, structure and function. The approach used in creating new sequences resembles that of naturally occurring pairs of proteins that are related by linear reorganization of their amino acid sequences (Cunningham, et al., (1979) Proc. Natl. Acad. Sci. U.S.A. 76:3218-3222; Teather and Erfle, (1990) J. Bacteriol. 172:3837-3841; Schimming, et al., (1992) Eur. J. Biochem. 204:13-19; Yamiuchi and Minamikawa, (1991) FEBS Lett. 260:127-130; MacGregor, et al., (1996) FEBS Lett. 378:263-266).

[0159] In another embodiment, fusion proteins are provided including within its amino acid sequence an amino acid sequence comprising a polypeptide of the disclosure. Polynucleotides encoding a polypeptide of the disclosure can be fused to a signal sequence transit peptide which will direct the localization of the polypeptide to particular compartments of a prokaryotic or eukaryotic cell and/or direct the secretion of the polypeptide of the embodiments from a prokaryotic or eukaryotic cell. For example, in E. coli, one may wish to direct the expression of the protein to the periplasmic space. Examples of signal sequences or proteins (or fragments thereof) to which the polypeptide may be fused to direct the expression of the polypeptide to the periplasmic space of bacteria include, but are not limited to, the pelB signal sequence, the maltose binding protein (MBP) signal sequence, MBP, the ompA signal sequence, the signal sequence of the periplasmic E. coli heat-labile enterotoxin B-subunit and the signal sequence of alkaline phosphatase. Several vectors are commercially available for the construction of fusion proteins which will direct the localization of a protein, such as the pMAL series of vectors (particularly the pMAL-p series) available from New England Biolabs. In a specific embodiment, the polypeptide of the disclosure may be fused to the pelB pectate lyase signal sequence to increase the efficiency of expression and purification of such polypeptides in Gram-negative bacteria (see, U.S. Pat. Nos. 5,576,195 and 5,846,818). Polynucleotides encoding a polypeptide of the disclosure can be fused to a plant plastid transit peptide. The plastid transit peptide is generally fused N-terminal to the polypeptide to be targeted (e.g., the fusion partner). In one embodiment, the fusion protein consists essentially of the plastid transit peptide and the polypeptide of the disclosure to be targeted. In another embodiment, the fusion protein comprises the plastid transit peptide and the polypeptide to be targeted. In such embodiments, the plastid transit peptide is preferably at the N-terminus of the fusion protein. However, additional amino acid residues may be N-terminal to the plastid transit peptide if the fusion protein is at least partially targeted to a plastid. In a specific embodiment, the plastid transit peptide is in the N-terminal half, N-terminal third or N-terminal quarter of the fusion protein. Most or all the plastid transit peptide is generally cleaved from the fusion protein upon insertion into the plastid. The position of cleavage may vary slightly between plant species, at different plant developmental stages, because of specific intercellular conditions or the combination of transit peptide/fusion partner used. In one embodiment, the plastid transit peptide cleavage is homogenous such that the cleavage site is identical in a population of fusion proteins. In another embodiment, the plastid transit peptide is not homogenous, such that the cleavage site varies by 1-10 amino acids in a population of fusion proteins. The plastid transit peptide can be recombinantly fused to a second protein in one of several ways. For example, a restriction endonuclease recognition site can be introduced into the nucleotide sequence of the transit peptide at a position corresponding to its C-terminal end and the same or a compatible site can be engineered into the nucleotide sequence of the protein to be targeted at its N-terminal end. Care must be taken in designing these sites to ensure that the coding sequences of the transit peptide and the second protein are kept “in frame” to allow the synthesis of the desired fusion protein. In some cases, it may be preferable to remove the initiator methionine of the second protein when the new restriction site is introduced. The introduction of restriction endonuclease recognition sites on both parent molecules and their subsequent joining through recombinant DNA techniques may result in the addition of one or more extra amino acids between the transit peptide and the second protein. This generally does not affect targeting activity if the transit peptide cleavage site remains accessible and the function of the second protein is not altered by the addition of these extra amino acids at its N-terminus. Alternatively, one skilled in the art can create a precise cleavage site between the transit peptide and the second protein (with or without its initiator methionine) using gene synthesis (Stemmer, et al., (1995) Gene 164:49-53) or similar methods. In addition, the transit peptide fusion can intentionally include amino acids downstream of the cleavage site. The amino acids at the N-terminus of the mature protein can affect the ability of the transit peptide to target proteins to plastids and/or the efficiency of cleavage following protein import. This may be dependent on the protein to be targeted. See, e.g., Comai, et al., (1988) J. Biol. Chem. 263(29):15104-9. In some embodiments, the polypeptide of the disclosure is fused to a heterologous signal peptide or heterologous transit peptide.

### Nucleic Acid Molecules, and Variants and Fragments Thereof

[0160] Isolated or recombinant nucleic acid molecules comprising nucleic acid sequences encoding polypeptides of the disclosure or biologically active portions thereof, as well as nucleic acid molecules sufficient for use as hybridization probes to identify nucleic acid molecules encoding proteins with regions of sequence homology are provided. As used herein, the term “nucleic acid molecule” refers to DNA molecules (e.g., recombinant DNA, cDNA, genomic DNA, plastid DNA, mitochondrial DNA) and RNA molecules (e.g., mRNA) and analogs of the DNA or RNA generated using nucleotide analogs. The nucleic acid molecule can be single-stranded or double-stranded, but preferably is double-stranded DNA.

[0161] An “isolated” nucleic acid molecule (or DNA) is used herein to refer to a nucleic acid sequence (or DNA) that is no longer in its natural environment, for example in vitro. A “recombinant” nucleic acid molecule (or DNA) is used herein to refer to a nucleic acid sequence (or DNA) that is in a recombinant bacterial or plant host cell. In some embodiments, an “isolated” or “recombinant” nucleic acid is free of sequences (preferably protein encoding sequences) that naturally flank the nucleic acid (i.e., sequences located at the 5′ and 3′ ends of the nucleic acid) in the genomic DNA of the organism from which the nucleic acid is derived. For purposes of the disclosure, “isolated” or “recombinant” when used to refer to nucleic acid molecules excludes isolated chromosomes. For example, in various embodiments, the recombinant nucleic acid molecules encoding polypeptides of the disclosure can contain less than about 5 kb, 4 kb, 3 kb, 2 kb, 1 kb, 0.5 kb or 0.1 kb of nucleic acid sequences that naturally flank the nucleic acid molecule in genomic DNA of the cell from which the nucleic acid is derived.

[0162] In some embodiments, an isolated nucleic acid molecule encoding polypeptides of the disclosure has one or more change in the nucleic acid sequence compared to the native or genomic nucleic acid sequence. In some embodiments, the change in the native or genomic nucleic acid sequence includes but is not limited to: changes in the nucleic acid sequence due to the degeneracy of the genetic code; changes in the nucleic acid sequence due to the amino acid substitution, insertion, deletion and/or addition compared to the native or genomic sequence; removal of one or more intron; deletion of one or more upstream or downstream regulatory regions; and deletion of the 5′ and/or 3′ untranslated region associated with the genomic nucleic acid sequence. In some embodiments, the nucleic acid molecule encoding a polypeptide of the disclosure is a non-genomic sequence.

[0163] A variety of polynucleotides encoding polypeptides of the disclosure or related proteins are contemplated. Such polynucleotides are useful for production of polypeptides of the disclosure in host cells when operably linked to a suitable promoter, transcription termination and/or polyadenylation sequences. Such polynucleotides are also useful as probes for isolating homologous or substantially homologous polynucleotides encoding polypeptides of the disclosure or related proteins.

### Polynucleotides Encoding IPD092-1 Polypeptides

[0164] Sources of polynucleotides encoding IPD092-1 polypeptides or related proteins are a Pseudomonas or Woodsholea bacterium.

[0165] In some embodiments polynucleotides are provided encoding an IPD092-1 polypeptide comprising an amino acid sequence having at least about 70%, 71%, 72%, 73%, 74%, 75%, 76%, 77%, 78%, 79%, 80%, 81%, 82%, 83%, 84%, 85%, 86%, 87%, 88%, 89%, 90%, 91%, 92%, 93%, 94%, 95%, 96%, 97%, 98%, 99% or greater identity across the entire length of the amino acid sequence of SEQ ID NO: 1, SEQ ID NO: 3, SEQ ID NO: 5, SEQ ID NO: 7, SEQ ID NO: 9, SEQ ID NO: 11, SEQ ID NO: 13, SEQ ID NO: 15, SEQ ID NO: 17, SEQ ID NO: 19, SEQ ID NO: 22, SEQ ID NO: 24 or SEQ ID NO: 26.

[0166] In some embodiments, the polynucleotide of the disclosure encodes an IPD092-1 polypeptide comprising an amino acid sequence of SEQ ID NO: 1, SEQ ID NO: 3, SEQ ID NO: 5, SEQ ID NO: 7, SEQ ID NO: 9, SEQ ID NO: 11, SEQ ID NO: 13, SEQ ID NO: 15, SEQ ID NO: 17, SEQ ID NO: 19, SEQ ID NO: 22, SEQ ID NO: 24 or SEQ ID NO: 26 having 1, 2, 3, 4, 5, 6, 7, 8, 9, 10 11, 12, 13, 14, 15, 16, 17, 18, 19, 20, 21, 22, 23, 24, 25, 26, 27, 28, 29, 30, 31, 32, 33, 34, 35, 36, 37, 38, 39, 40, 41, 42, 43, 44, 45, 46, 47, 48, 49, 50, 51, 52, 53, 54, 55, 56, 57, 58, 59, 60, 61, 62, 63, 64, 65, 66, 67, 68, 69, 70,71, 72, 73, 74, 75, 76, 77, 78, 79, 80, 81, 82, 83, 84, 85, 86, 87, 88, 89, 90, 91, 92, 93, 94, 95 or more amino acid substitutions compared to the native amino acid at the corresponding position of SEQ ID NO: 1, SEQ ID NO: 3, SEQ ID NO: 5, SEQ ID NO: 7, SEQ ID NO: 9, SEQ ID NO: 11, SEQ ID NO: 13, SEQ ID NO: 15, SEQ ID NO: 17, SEQ ID NO: 19, SEQ ID NO: 22, SEQ ID NO: 24 or SEQ ID NO: 26.

[0167] In some embodiments, the nucleic acid molecule encoding an IPD092-1 polypeptide, comprises the sequence set forth in SEQ ID NO: 546, SEQ ID NO: 549, SEQ ID NO: 550, SEQ ID NO: 552, SEQ ID NO: 554, SEQ ID NO: 556, SEQ ID NO: 558 or SEQ ID NO: 560, and variants, fragments and complements thereof. “Polynucleotide sequence variants” is used herein to refer to a nucleic acid sequence that except for the degeneracy of the genetic code encodes the same polypeptide.

### Polynucleotides Encoding IPD092-2 Polypeptides

[0168] Sources of polynucleotides encoding IPD092-2 polypeptide homologs or related proteins include bacterial species selected from but not limited to Pseudomonas species, Chromobacterium species, Burkholderia species, and Woodsholea species.

[0169] In some embodiments polynucleotides are provided encoding an IPD092-2 polypeptide having at least about 70%, 71%, 72%, 73%, 74%, 75%, 76%, 77%, 78%, 79%, 80%, 81%, 82%, 83%, 84%, 85%, 86%, 87%, 88%, 89%, 90%, 91%, 92%, 93%, 94%, 95%, 96%, 97%, 98%, 99% or greater identity across the entire length of the amino acid sequence of SEQ ID NO: 2, SEQ ID NO: 4, SEQ ID NO: 6, SEQ ID NO: 8, SEQ ID NO: 10, SEQ ID NO: 12, SEQ ID NO: 14, SEQ ID NO: 16, SEQ ID NO: 18, SEQ ID NO: 20, SEQ ID NO: 21, SEQ ID NO: 23 or SEQ ID NO: 25.

[0170] In some embodiments polynucleotides are provided encoding an IPD092-2 polypeptide comprising an amino acid sequence of SEQ ID NO: 2, SEQ ID NO: 4, SEQ ID NO: 6, SEQ ID NO: 8, SEQ ID NO: 10, SEQ ID NO: 12, SEQ ID NO: 14, SEQ ID NO: 16, SEQ ID NO: 18, SEQ ID NO: 20, SEQ ID NO: 21, SEQ ID NO: 23 or SEQ ID NO: 25 having 1, 2, 3, 4, 5, 6, 7, 8, 9, 10 11, 12, 13, 14, 15, 16, 17, 18, 19, 20, 21, 22, 23, 24, 25, 26, 27, 28, 29, 30, 31, 32, 33, 34, 35, 36, 37, 38, 39, 40, 41, 42, 43, 44, 45, 46, 47, 48, 49, 50, 51, 52, 53, 54, 55, 56, 57, 58, 59, 60, 61, 62, 63, 64, 65, 66, 67, 68, 69, 70 or more amino acid substitutions compared to the native amino acid at the corresponding position of SEQ ID NO: 2, SEQ ID NO: 4, SEQ ID NO: 6, SEQ ID NO: 8, SEQ ID NO: 10, SEQ ID NO: 12, SEQ ID NO: 14, SEQ ID NO: 16, SEQ ID NO: 18, SEQ ID NO: 20, SEQ ID NO: 21, SEQ ID NO: 23 or SEQ ID NO: 25.

[0171] In some embodiments polynucleotides are provided encoding an IPD092-2 polypeptide comprising the amino acid sequence of SEQ ID NO: 2, SEQ ID NO: 4, SEQ ID NO: 6, SEQ ID NO: 8, SEQ ID NO: 10, SEQ ID NO: 12, SEQ ID NO: 14, SEQ ID NO: 16, SEQ ID NO: 18, SEQ ID NO: 20, SEQ ID NO: 21, SEQ ID NO: 23 or SEQ ID NO: 25.

[0172] In some embodiments, the nucleic acid molecule encoding an IPD092-2 polypeptide, comprises the sequence set forth in SEQ ID NO: 547, SEQ ID NO: 548, SEQ ID NO: 551, SEQ ID NO: 553, SEQ ID NO: 555, SEQ ID NO: 557, SEQ ID NO: 559 or SEQ ID NO: 561, and variants, fragments and complements thereof.

### Polynucleotides Encoding IPD095-1 Polypeptides

[0173] Sources of polynucleotides encoding IPD095-1 polypeptide homologs or related proteins include bacterial species selected from but not limited to Serratia species, Leminorella species, Dickeya species, Enterobacter species, Erwinia species, Yersinia species, and Rahnella species.

[0174] In some embodiments polynucleotides are provided encoding an IPD095-1 polypeptide comprising an amino acid sequence having at least about 70%, 71%, 72%, 73%, 74%, 75%, 76%, 77%, 78%, 79%, 80%, 81%, 82%, 83%, 84%, 85%, 86%, 87%, 88%, 89%, 90%, 91%, 92%, 93%, 94%, 95%, 96%, 97%, 98%, 99% or greater identity across the entire length of the amino acid sequence of SEQ ID NO: 27, SEQ ID NO: 29, SEQ ID NO: 30, SEQ ID NO: 31, SEQ ID NO: 32, SEQ ID NO: 33, SEQ ID NO: 34, SEQ ID NO: 35, SEQ ID NO: 36, SEQ ID NO: 37, SEQ ID NO: 38, SEQ ID NO: 39, SEQ ID NO: 40, SEQ ID NO: 41, SEQ ID NO: 42, SEQ ID NO: 43, SEQ ID NO: 44, SEQ ID NO: 45, SEQ ID NO: 46, SEQ ID NO: 47, SEQ ID NO: 48, SEQ ID NO: 49, SEQ ID NO: 50, SEQ ID NO: 51, SEQ ID NO: 52, SEQ ID NO: 53, SEQ ID NO: 54, SEQ ID NO: 55, SEQ ID NO: 56, SEQ ID NO: 57 or SEQ ID NO: 58.

[0175] In some embodiments polynucleotides of are provided encoding an IPD095-1 polypeptide comprising an amino acid sequence having at least 95%, 95.5% 96%, 96.5%, 97%, 97%.5%, 98%, 98.1%, 98.2%, 98.3%, 98.4%, 98.5%, 98.6%, 98.7%, 98.8%, 98.9%, 99%, 99.1%, 99.2%, 99.3%, 99.4%, 99.5%, 99.6%, 99.7%, 99.8%, 99.9% or greater identity across the entire length of the amino acid sequence of SEQ ID NO: 27, SEQ ID NO: 29, SEQ ID NO: 30, SEQ ID NO: 34, SEQ ID NO: 35, SEQ ID NO: 38, SEQ ID NO: 41, SEQ ID NO: 42, SEQ ID NO: 43, SEQ ID NO: 48, SEQ ID NO: 49, SEQ ID NO: 50, SEQ ID NO: 51, SEQ ID NO: 54, SEQ ID NO: 56 or SEQ ID NO: 57.

[0176] In some embodiments polynucleotides are provided encoding an IPD095-1 polypeptide comprising an amino acid sequence of SEQ ID NO: 27, SEQ ID NO: 29, SEQ ID NO: 30, SEQ ID NO: 31, SEQ ID NO: 32, SEQ ID NO: 33, SEQ ID NO: 34, SEQ ID NO: 35, SEQ ID NO: 36, SEQ ID NO: 37, SEQ ID NO: 38, SEQ ID NO: 39, SEQ ID NO: 40, SEQ ID NO: 41, SEQ ID NO: 42, SEQ ID NO: 43, SEQ ID NO: 44, SEQ ID NO: 45, SEQ ID NO: 46, SEQ ID NO: 47, SEQ ID NO: 48, SEQ ID NO: 49, SEQ ID NO: 50, SEQ ID NO: 51, SEQ ID NO: 52, SEQ ID NO: 53, SEQ ID NO: 54, SEQ ID NO: 55, SEQ ID NO: 56, SEQ ID NO: 57 or SEQ ID NO: 58 having 1, 2, 3, 4, 5, 6, 7, 8, 9, 10 11, 12, 13, 14, 15, 16, 17, 18, 19, 20, 21, 22, 23, 24, 25, 26, 27, 28, 29, 30, 31, 32, 33, 34, 35, 36, 37, 38, 39, 40, 41, 42, 43, 44, 45, 46, 47, 48, 49, 50, 51, 52, 53, 54, 55, 56, 57, 58, 59, 60, 61, 62, 63, 64, 65, 66, 67, 68, 69, 70, 71, 72, 73, 74, 75, 76, 77, 78, 79, 80, 81, 82, 83, 84, 85 or more amino acid substitutions compared to the native amino acid at the corresponding position of SEQ ID NO: 27, SEQ ID NO: 29, SEQ ID NO: 30, SEQ ID NO: 31, SEQ ID NO: 32, SEQ ID NO: 33, SEQ ID NO: 34, SEQ ID NO: 35, SEQ ID NO: 36, SEQ ID NO: 37, SEQ ID NO: 38, SEQ ID NO: 39, SEQ ID NO: 40, SEQ ID NO: 41, SEQ ID NO: 42, SEQ ID NO: 43, SEQ ID NO: 44, SEQ ID NO: 45, SEQ ID NO: 46, SEQ ID NO: 47, SEQ ID NO: 48, SEQ ID NO: 49, SEQ ID NO: 50, SEQ ID NO: 51, SEQ ID NO: 52, SEQ ID NO: 53, SEQ ID NO: 54, SEQ ID NO: 55, SEQ ID NO: 56, SEQ ID NO: 57 or SEQ ID NO: 58.

[0177] In some embodiments polynucleotides are provided encoding an IPD095-1 polypeptide comprising the amino acid sequence of SEQ ID NO: 27, SEQ ID NO: 29, SEQ ID NO: 30, SEQ ID NO: 31, SEQ ID NO: 32, SEQ ID NO: 33, SEQ ID NO: 34, SEQ ID NO: 35, SEQ ID NO: 36, SEQ ID NO: 37, SEQ ID NO: 38, SEQ ID NO: 39, SEQ ID NO: 40, SEQ ID NO: 41, SEQ ID NO: 42, SEQ ID NO: 43, SEQ ID NO: 44, SEQ ID NO: 45, SEQ ID NO: 46, SEQ ID NO: 47, SEQ ID NO: 48, SEQ ID NO: 49, SEQ ID NO: 50, SEQ ID NO: 51, SEQ ID NO: 52, SEQ ID NO: 53, SEQ ID NO: 54, SEQ ID NO: 55, SEQ ID NO: 56, SEQ ID NO: 57 or SEQ ID NO: 58.

[0178] In some embodiments polynucleotides are provided encoding an IPD095-1 polypeptide comprising the amino acid sequence of SEQ ID NO: 27, SEQ ID NO: 29, SEQ ID NO: 30, SEQ ID NO: 34, SEQ ID NO: 35, SEQ ID NO: 38, SEQ ID NO: 41, SEQ ID NO: 42, SEQ ID NO: 43, SEQ ID NO: 48, SEQ ID NO: 49, SEQ ID NO: 50, SEQ ID NO: 51, SEQ ID NO: 54, SEQ ID NO: 56 or SEQ ID NO: 57.

[0179] In some embodiments polynucleotides are provided, encoding an IPD095-1 polypeptide, comprising the nucleic acid sequence of SEQ ID NO: 562, SEQ ID NO: 564, SEQ ID NO: 565, SEQ ID NO: 566, SEQ ID NO: 567, SEQ ID NO: 568, SEQ ID NO: 569, SEQ ID NO: 570, SEQ ID NO: 571, SEQ ID NO: 572, SEQ ID NO: 573 or SEQ ID NO: 574.

### Polynucleotides Encoding IPD095-2 Polypeptides

[0180] Sources of polynucleotides encoding an IPD095-2 polypeptide homologs or related proteins include bacterial species selected from but not limited to Serratia species, Leminorella species, Dickeya species, Enterobacter species, Erwinia species, Yersinia species, and Rahnella species. In some embodiments, the polynucleotide of the disclosure encodes an IPD095-2 polypeptide comprising an amino acid sequence having at least about 70%, 71%, 72%, 73%, 74%, 75%, 76%, 77%, 78%, 79%, 80%, 81%, 82%, 83%, 84%, 85%, 86%, 87%, 88%, 89%, 90%, 91%, 92%, 93%, 94%, 95%, 96%, 97%, 98%, 99% or greater identity across the entire length of the amino acid sequence of SEQ ID NO: 28, SEQ ID NO: 59, SEQ ID NO: 60, SEQ ID NO: 61, SEQ ID NO: 62, SEQ ID NO: 63, SEQ ID NO: 64, SEQ ID NO: 65, SEQ ID NO: 66, SEQ ID NO: 67, SEQ ID NO: 68, SEQ ID NO: 69, SEQ ID NO: 70, SEQ ID NO: 71, SEQ ID NO: 72, SEQ ID NO: 73, SEQ ID NO: 74, SEQ ID NO: 75, SEQ ID NO: 76, SEQ ID NO: 77, SEQ ID NO: 78, SEQ ID NO: 79, SEQ ID NO: 80, SEQ ID NO: 81, SEQ ID NO: 82, SEQ ID NO: 83, SEQ ID NO: 84, SEQ ID NO: 85, SEQ ID NO: 86, SEQ ID NO: 87, SEQ ID NO: 88, SEQ ID NO: 89, SEQ ID NO: 90, SEQ ID NO: 91, SEQ ID NO: 92, SEQ ID NO: 93, SEQ ID NO: 94, SEQ ID NO: 95, SEQ ID NO: 96, SEQ ID NO: 97, SEQ ID NO: 98, SEQ ID NO: 99, SEQ ID NO: 100, SEQ ID NO: 101, SEQ ID NO: 102, SEQ ID NO: 103, SEQ ID NO: 104, SEQ ID NO: 105, SEQ ID NO: 106, SEQ ID NO: 107, SEQ ID NO: 108, SEQ ID NO: 109, SEQ ID NO: 110, SEQ ID NO: 111, SEQ ID NO: 112, SEQ ID NO: 113, SEQ ID NO: 114, SEQ ID NO: 115, SEQ ID NO: 116, SEQ ID NO: 117, SEQ ID NO: 118, SEQ ID NO: 119 or SEQ ID NO: 120.

[0181] In some embodiments, the polynucleotide of the disclosure encodes an IPD095-2 polypeptide comprising an amino acid sequence having at least 95%, 95.5% 96%, 96.5%, 97%, 97%.5%, 98%, 98.1%, 98.2%, 98.3%, 98.4%, 98.5%, 98.6%, 98.7%, 98.8%, 98.9%, 99%, 99.1%, 99.2%, 99.3%, 99.4%, 99.5%, 99.6%, 99.7%, 99.8%, 99.9% or greater identity across the entire length of the amino acid sequence of SEQ ID NO: 28, SEQ ID NO: 59, SEQ ID NO: 60, SEQ ID NO: 61, SEQ ID NO: 63, SEQ ID NO: 66, SEQ ID NO: 67, SEQ ID NO: 68, SEQ ID NO: 75, SEQ ID NO: 77, SEQ ID NO: 78, SEQ ID NO: 79, SEQ ID NO: 82, SEQ ID NO: 83, SEQ ID NO: 84, SEQ ID NO: 85, SEQ ID NO: 86, SEQ ID NO: 94, SEQ ID NO: 95, SEQ ID NO: 96, SEQ ID NO: 97, SEQ ID NO: 99, SEQ ID NO: 100, SEQ ID NO: 103, SEQ ID NO: 107, SEQ ID NO: 119 or SEQ ID NO: 120.

[0182] In some embodiments polynucleotides are provided encoding an IPD095-2 polypeptide comprising an amino acid sequence of SEQ ID NO: 28, SEQ ID NO: 59, SEQ ID NO: 60, SEQ ID NO: 61, SEQ ID NO: 62, SEQ ID NO: 63, SEQ ID NO: 64, SEQ ID NO: 65, SEQ ID NO: 66, SEQ ID NO: 67, SEQ ID NO: 68, SEQ ID NO: 69, SEQ ID NO: 70, SEQ ID NO: 71, SEQ ID NO: 72, SEQ ID NO: 73, SEQ ID NO: 74, SEQ ID NO: 75, SEQ ID NO: 76, SEQ ID NO: 77, SEQ ID NO: 78, SEQ ID NO: 79, SEQ ID NO: 80, SEQ ID NO: 81, SEQ ID NO: 82, SEQ ID NO: 83, SEQ ID NO: 84, SEQ ID NO: 85, SEQ ID NO: 86, SEQ ID NO: 87, SEQ ID NO: 88, SEQ ID NO: 89, SEQ ID NO: 90, SEQ ID NO: 91, SEQ ID NO: 92, SEQ ID NO: 93, SEQ ID NO: 94, SEQ ID NO: 95, SEQ ID NO: 96, SEQ ID NO: 97, SEQ ID NO: 98, SEQ ID NO: 99, SEQ ID NO: 100, SEQ ID NO: 101, SEQ ID NO: 102, SEQ ID NO: 103, SEQ ID NO: 104, SEQ ID NO: 105, SEQ ID NO: 106, SEQ ID NO: 107, SEQ ID NO: 108, SEQ ID NO: 109, SEQ ID NO: 110, SEQ ID NO: 111, SEQ ID NO: 112, SEQ ID NO: 113, SEQ ID NO: 114, SEQ ID NO: 115, SEQ ID NO: 116, SEQ ID NO: 117, SEQ ID NO: 118, SEQ ID NO: 119 or SEQ ID NO: 120 having 1, 2, 3, 4, 5, 6, 7, 8, 9, 10 11, 12, 13, 14, 15, 16, 17, 18, 19, 20, 21, 22, 23, 24, 25, 26, 27, 28, 29, 30, 31, 32, 33, 34, 35, 36, 37, 38, 39, 40, 41, 42, 43, 44, 45, 46, 47, 48, 49, 50, 51, 52, 53, 54, 55, 56, 57, 58, 59, 60, 61, 62, 63, 64, 65, 66, 67, 68, 69, 70, 71, 72, 73, 74, 75, 76, 77, 78, 78, 79, 80, 81, 82, 83, 84, 85 or more amino acid substitutions compared to the native amino acid at the corresponding position of SEQ ID NO: 28, SEQ ID NO: 59, SEQ ID NO: 60, SEQ ID NO: 61, SEQ ID NO: 62, SEQ ID NO: 63, SEQ ID NO: 64, SEQ ID NO: 65, SEQ ID NO: 66, SEQ ID NO: 67, SEQ ID NO: 68, SEQ ID NO: 69, SEQ ID NO: 70, SEQ ID NO: 71, SEQ ID NO: 72, SEQ ID NO: 73, SEQ ID NO: 74, SEQ ID NO: 75, SEQ ID NO: 76, SEQ ID NO: 77, SEQ ID NO: 78, SEQ ID NO: 79, SEQ ID NO: 80, SEQ ID NO: 81, SEQ ID NO: 82, SEQ ID NO: 83, SEQ ID NO: 84, SEQ ID NO: 85, SEQ ID NO: 86, SEQ ID NO: 87, SEQ ID NO: 88, SEQ ID NO: 89, SEQ ID NO: 90, SEQ ID NO: 91, SEQ ID NO: 92, SEQ ID NO: 93, SEQ ID NO: 94, SEQ ID NO: 95, SEQ ID NO: 96, SEQ ID NO: 97, SEQ ID NO: 98, SEQ ID NO: 99, SEQ ID NO: 100, SEQ ID NO: 101, SEQ ID NO: 102, SEQ ID NO: 103, SEQ ID NO: 104, SEQ ID NO: 105, SEQ ID NO: 106, SEQ ID NO: 107, SEQ ID NO: 108, SEQ ID NO: 109, SEQ ID NO: 110, SEQ ID NO: 111, SEQ ID NO: 112, SEQ ID NO: 113, SEQ ID NO: 114, SEQ ID NO: 115, SEQ ID NO: 116, SEQ ID NO: 117, SEQ ID NO: 118, SEQ ID NO: 119 or SEQ ID NO: 120.

[0183] In some embodiments, the polynucleotide of the disclosure encodes an IPD095-2 polypeptide comprising the amino acid sequence of SEQ ID NO: 28, SEQ ID NO: 59, SEQ ID NO: 60, SEQ ID NO: 61, SEQ ID NO: 62, SEQ ID NO: 63, SEQ ID NO: 64, SEQ ID NO: 65, SEQ ID NO: 66, SEQ ID NO: 67, SEQ ID NO: 68, SEQ ID NO: 69, SEQ ID NO: 70, SEQ ID NO: 71, SEQ ID NO: 72, SEQ ID NO: 73, SEQ ID NO: 74, SEQ ID NO: 75, SEQ ID NO: 76, SEQ ID NO: 77, SEQ ID NO: 78, SEQ ID NO: 79, SEQ ID NO: 80, SEQ ID NO: 81, SEQ ID NO: 82, SEQ ID NO: 83, SEQ ID NO: 84, SEQ ID NO: 85, SEQ ID NO: 86, SEQ ID NO: 87, SEQ ID NO: 88, SEQ ID NO: 89, SEQ ID NO: 90, SEQ ID NO: 91, SEQ ID NO: 92, SEQ ID NO: 93, SEQ ID NO: 94, SEQ ID NO: 95, SEQ ID NO: 96, SEQ ID NO: 97, SEQ ID NO: 98, SEQ ID NO: 99, SEQ ID NO: 100, SEQ ID NO: 101, SEQ ID NO: 102, SEQ ID NO: 103, SEQ ID NO: 104, SEQ ID NO: 105, SEQ ID NO: 106, SEQ ID NO: 107, SEQ ID NO: 108, SEQ ID NO: 109, SEQ ID NO: 110, SEQ ID NO: 111, SEQ ID NO: 112, SEQ ID NO: 113, SEQ ID NO: 114, SEQ ID NO: 115, SEQ ID NO: 116, SEQ ID NO: 117, SEQ ID NO: 118, SEQ ID NO: 119 or SEQ ID NO: 120.

[0184] In some embodiments polynucleotides are provided encoding an IPD095-2 polypeptide comprising the amino acid sequence of SEQ ID NO: 28, SEQ ID NO: 59, SEQ ID NO: 60, SEQ ID NO: 61, SEQ ID NO: 63, SEQ ID NO: 66, SEQ ID NO: 67, SEQ ID NO: 68, SEQ ID NO: 75, SEQ ID NO: 77, SEQ ID NO: 78, SEQ ID NO: 79, SEQ ID NO: 82, SEQ ID NO: 83, SEQ ID NO: 84, SEQ ID NO: 85, SEQ ID NO: 86, SEQ ID NO: 94, SEQ ID NO: 95, SEQ ID NO: 96, SEQ ID NO: 97, SEQ ID NO: 99, SEQ ID NO: 100, SEQ ID NO: 103, SEQ ID NO: 107, SEQ ID NO: 119 or SEQ ID NO: 120.

[0185] In some embodiments polynucleotides are provided, encoding an IPD095-2 polypeptide, comprising the nucleic acid sequence of SEQ ID NO: 563, SEQ ID NO: 575, SEQ ID NO: 576, SEQ ID NO: 577, SEQ ID NO: 578, SEQ ID NO: 579, SEQ ID NO: 580, SEQ ID NO: 581, SEQ ID NO: 582, SEQ ID NO: 583, SEQ ID NO: 584, SEQ ID NO: 585, SEQ ID NO: 586, SEQ ID NO: 587, SEQ ID NO: 588 or SEQ ID NO: 589.

### Polynucleotides Encoding IPD097 Polypeptides

[0186] Sources of polynucleotides encoding IPD097 polypeptide homologs or related proteins include bacterial species selected from but not limited to Haemophilus species, Aeromonas species, and Clostridiales species. In some embodiments polynucleotides are provided encoding an IPD097 polypeptide comprising an amino acid sequence having at least about 70%, 71%, 72%, 73%, 74%, 75%, 76%, 77%, 78%, 79%, 80%, 81%, 82%, 83%, 84%, 85%, 86%, 87%, 88%, 89%, 90%, 91%, 92%, 93%, 94%, 95%, 96%, 97%, 98%, 99% or greater identity across the entire length of the amino acid sequence of SEQ ID NO: 121, SEQ ID NO: 122, SEQ ID NO: 123, SEQ ID NO: 124, SEQ ID NO: 125, SEQ ID NO: 126, SEQ ID NO: 127, SEQ ID NO: 128, SEQ ID NO: 129, SEQ ID NO: 130, SEQ ID NO: 131, SEQ ID NO: 132, SEQ ID NO: 133, SEQ ID NO: 134 or SEQ ID NO: 135.

[0187] In some embodiments polynucleotides are provided encoding an IPD097 polypeptide comprising an amino acid sequence having at least 95%, 95.5% 96%, 96.5%, 97%, 97%.5%, 98%, 98.1%, 98.2%, 98.3%, 98.4%, 98.5%, 98.6%, 98.7%, 98.8%, 98.9%, 99%, 99.1%, 99.2%, 99.3%, 99.4%, 99.5%, 99.6%, 99.7%, 99.8%, 99.9% or greater identity across the entire length of the amino acid sequence of SEQ ID NO: 121, SEQ ID NO: 123, SEQ ID NO: 127, SEQ ID NO: 128, SEQ ID NO: 129, SEQ ID NO: 131 or SEQ ID NO: 132.

[0188] In some embodiments polynucleotides are provided encoding an IPD097 polypeptide comprising an amino acid sequence of SEQ ID NO: 121, SEQ ID NO: 122, SEQ ID NO: 123, SEQ ID NO: 124, SEQ ID NO: 125, SEQ ID NO: 126, SEQ ID NO: 127, SEQ ID NO: 128, SEQ ID NO: 129, SEQ ID NO: 130, SEQ ID NO: 131, SEQ ID NO: 132, SEQ ID NO: 133, SEQ ID NO: 134 or SEQ ID NO: 135 having 1, 2, 3, 4, 5, 6, 7, 8, 9, 10 11, 12, 13, 14, 15, 16, 17, 18, 19, 20, 21, 22, 23, 24, 25, 26, 27, 28, 29, 30, 31, 32, 33, 34, 35, 36, 37, 38, 39, 40, 41, 42, 43, 44, 45, 46, 47, 48, 49, 50, 51, 52, 53, 54, 55, 56, 57, 58, 59, 60, 61, 62, 63, 64, 65, 66, 67, 68, 69, 70 or more amino acid substitutions compared to the native amino acid at the corresponding position of SEQ ID NO: 121, SEQ ID NO: 122, SEQ ID NO: 123, SEQ ID NO: 124, SEQ ID NO: 125, SEQ ID NO: 126, SEQ ID NO: 127, SEQ ID NO: 128, SEQ ID NO: 129, SEQ ID NO: 130, SEQ ID NO: 131, SEQ ID NO: 132, SEQ ID NO: 133, SEQ ID NO: 134 or SEQ ID NO: 135.

[0189] In some embodiments polynucleotides are provided encoding an IPD097 polypeptide comprising the amino acid sequence of SEQ ID NO: 121, SEQ ID NO: 122, SEQ ID NO: 123, SEQ ID NO: 124, SEQ ID NO: 125, SEQ ID NO: 126, SEQ ID NO: 127, SEQ ID NO: 128, SEQ ID NO: 129, SEQ ID NO: 130, SEQ ID NO: 131, SEQ ID NO: 132, SEQ ID NO: 133, SEQ ID NO: 134 or SEQ ID NO: 135.

[0190] In some embodiments polynucleotides are provided encoding an IPD097 polypeptide comprising the amino acid sequence of SEQ ID NO: 121, SEQ ID NO: 123, SEQ ID NO: 127, SEQ ID NO: 128, SEQ ID NO: 129, SEQ ID NO: 131 or SEQ ID NO: 132.

[0191] In some embodiments polynucleotides are provided, encoding an IPD097 polypeptide, comprising the nucleic acid sequence of SEQ ID NO: 590.

### Polynucleotides Encoding IPD099-1 Polypeptides

[0192] Sources of polynucleotides encoding IPD099-1 polypeptide homologs or related proteins include bacterial species selected from but not limited to Aeromonas species, Haemophilus species, Burkholderia species, Chromobacterium species, Erwinia species, Serratia species, Salinivibrio species, Aquimarina species, Janthinobacterium species, Tolypothrix species, Photobacterium species, Janthinobacterium species, Rhizobium species, Moritella species, Providencia species, Yersinia species and Vibrio species.

[0193] In some embodiments polynucleotides are provided encoding an IPD099-1 polypeptide comprising an amino acid sequence having at least about 70%, 71%, 72%, 73%, 74%, 75%, 76%, 77%, 78%, 79%, 80%, 81%, 82%, 83%, 84%, 85%, 86%, 87%, 88%, 89%, 90%, 91%, 92%, 93%, 94%, 95%, 96%, 97%, 98%, 99% or greater identity across the entire length of the amino acid sequence of SEQ ID NO: 136, SEQ ID NO: 139, SEQ ID NO: 140, SEQ ID NO: 141, SEQ ID NO: 142, SEQ ID NO: 143, SEQ ID NO: 144, SEQ ID NO: 145, SEQ ID NO: 146, SEQ ID NO: 147, SEQ ID NO: 148, SEQ ID NO: 149, SEQ ID NO: 150, SEQ ID NO: 151, SEQ ID NO: 152, SEQ ID NO: 153, SEQ ID NO: 154, SEQ ID NO: 155, SEQ ID NO: 156, SEQ ID NO: 157, SEQ ID NO: 158, SEQ ID NO: 159, SEQ ID NO: 160, SEQ ID NO: 161, SEQ ID NO: 162, SEQ ID NO: 163, SEQ ID NO: 164, SEQ ID NO: 165, SEQ ID NO: 166, SEQ ID NO: 167, SEQ ID NO: 168, SEQ ID NO: 169, SEQ ID NO: 170, SEQ ID NO: 171, SEQ ID NO: 172, SEQ ID NO: 173, SEQ ID NO: 174, SEQ ID NO: 175, SEQ ID NO: 176, SEQ ID NO: 177, SEQ ID NO: 178, SEQ ID NO: 179, SEQ ID NO: 180, SEQ ID NO: 181, SEQ ID NO: 182, SEQ ID NO: 183, SEQ ID NO: 184, SEQ ID NO: 185, SEQ ID NO: 186, SEQ ID NO: 187, SEQ ID NO: 188, SEQ ID NO: 189, SEQ ID NO: 190, SEQ ID NO: 191, SEQ ID NO: 192, SEQ ID NO: 193, SEQ ID NO: 194, SEQ ID NO: 195, SEQ ID NO: 196, SEQ ID NO: 197, SEQ ID NO: 198, SEQ ID NO: 199, SEQ ID NO: 200, SEQ ID NO: 201, SEQ ID NO: 202, SEQ ID NO: 203, SEQ ID NO: 204, SEQ ID NO: 205, SEQ ID NO: 206, SEQ ID NO: 207, SEQ ID NO: 208, SEQ ID NO: 209, SEQ ID NO: 210, SEQ ID NO: 211, SEQ ID NO: 212, SEQ ID NO: 213, SEQ ID NO: 214 or SEQ ID NO: 215.

[0194] In some embodiments polynucleotides are provided encoding an IPD099-1 polypeptide comprising an amino acid sequence having at least 95%, 95.5% 96%, 96.5%, 97%, 97%.5%, 98%, 98.1%, 98.2%, 98.3%, 98.4%, 98.5%, 98.6%, 98.7%, 98.8%, 98.9%, 99%, 99.1%, 99.2%, 99.3%, 99.4%, 99.5%, 99.6%, 99.7%, 99.8%, 99.9% or greater identity across the entire length of the amino acid sequence of SEQ ID NO: 136, SEQ ID NO: 139, SEQ ID NO: 140, SEQ ID NO: 142, SEQ ID NO: 144, SEQ ID NO: 145, SEQ ID NO: 148, SEQ ID NO: 149, SEQ ID NO: 150, SEQ ID NO: 155, SEQ ID NO: 157, SEQ ID NO: 158, SEQ ID NO: 177, SEQ ID NO: 179, SEQ ID NO: 180, SEQ ID NO: 183, SEQ ID NO: 185, SEQ ID NO: 186, SEQ ID NO: 187, SEQ ID NO: 188, SEQ ID NO: 189, SEQ ID NO: 192, SEQ ID NO: 195, SEQ ID NO: 196, SEQ ID NO: 197, SEQ ID NO: 199, SEQ ID NO: 205, SEQ ID NO: 208, SEQ ID NO: 209, SEQ ID NO: 210 or SEQ ID NO: 215.

[0195] In some embodiments polynucleotides are provided encoding an IPD099-1 polypeptide comprising an amino acid sequence of SEQ ID NO: 136, SEQ ID NO: 139, SEQ ID NO: 140, SEQ ID NO: 141, SEQ ID NO: 142, SEQ ID NO: 143, SEQ ID NO: 144, SEQ ID NO: 145, SEQ ID NO: 146, SEQ ID NO: 147, SEQ ID NO: 148, SEQ ID NO: 149, SEQ ID NO: 150, SEQ ID NO: 151, SEQ ID NO: 152, SEQ ID NO: 153, SEQ ID NO: 154, SEQ ID NO: 155, SEQ ID NO: 156, SEQ ID NO: 157, SEQ ID NO: 158, SEQ ID NO: 159, SEQ ID NO: 160, SEQ ID NO: 161, SEQ ID NO: 162, SEQ ID NO: 163, SEQ ID NO: 164, SEQ ID NO: 165, SEQ ID NO: 166, SEQ ID NO: 167, SEQ ID NO: 168, SEQ ID NO: 169, SEQ ID NO: 170, SEQ ID NO: 171, SEQ ID NO: 172, SEQ ID NO: 173, SEQ ID NO: 174, SEQ ID NO: 175, SEQ ID NO: 176, SEQ ID NO: 177, SEQ ID NO: 178, SEQ ID NO: 179, SEQ ID NO: 180, SEQ ID NO: 181, SEQ ID NO: 182, SEQ ID NO: 183, SEQ ID NO: 184, SEQ ID NO: 185, SEQ ID NO: 186, SEQ ID NO: 187, SEQ ID NO: 188, SEQ ID NO: 189, SEQ ID NO: 190, SEQ ID NO: 191, SEQ ID NO: 192, SEQ ID NO: 193, SEQ ID NO: 194, SEQ ID NO: 195, SEQ ID NO: 196, SEQ ID NO: 197, SEQ ID NO: 198, SEQ ID NO: 199, SEQ ID NO: 200, SEQ ID NO: 201, SEQ ID NO: 202, SEQ ID NO: 203, SEQ ID NO: 204, SEQ ID NO: 205, SEQ ID NO: 206, SEQ ID NO: 207, SEQ ID NO: 208, SEQ ID NO: 209, SEQ ID NO: 210, SEQ ID NO: 211, SEQ ID NO: 212, SEQ ID NO: 213, SEQ ID NO: 214 or SEQ ID NO: 215 having 1, 2, 3, 4, 5, 6, 7, 8, 9, 10 11, 12, 13, 14, 15, 16, 17, 18, 19, 20, 21, 22, 23, 24, 25, 26, 27, 28, 29, 30, 31, 32, 33, 34, 35, 36, 37, 38, 39, 40, 41, 42, 43, 44, 45, 46, 47, 48, 49, 50, 51, 52, 53, 54, 55, 56, 57, 58, 59, 60, 61, 62, 63, 64, 65, 66, 67, 68, 69, 70 or more amino acid substitutions compared to the native amino acid at the corresponding position of SEQ ID NO: 136, SEQ ID NO: 139, SEQ ID NO: 140, SEQ ID NO: 141, SEQ ID NO: 142, SEQ ID NO: 143, SEQ ID NO: 144, SEQ ID NO: 145, SEQ ID NO: 146, SEQ ID NO: 147, SEQ ID NO: 148, SEQ ID NO: 149, SEQ ID NO: 150, SEQ ID NO: 151, SEQ ID NO: 152, SEQ ID NO: 153, SEQ ID NO: 154, SEQ ID NO: 155, SEQ ID NO: 156, SEQ ID NO: 157, SEQ ID NO: 158, SEQ ID NO: 159, SEQ ID NO: 160, SEQ ID NO: 161, SEQ ID NO: 162, SEQ ID NO: 163, SEQ ID NO: 164, SEQ ID NO: 165, SEQ ID NO: 166, SEQ ID NO: 167, SEQ ID NO: 168, SEQ ID NO: 169, SEQ ID NO: 170, SEQ ID NO: 171, SEQ ID NO: 172, SEQ ID NO: 173, SEQ ID NO: 174, SEQ ID NO: 175, SEQ ID NO: 176, SEQ ID NO: 177, SEQ ID NO: 178, SEQ ID NO: 179, SEQ ID NO: 180, SEQ ID NO: 181, SEQ ID NO: 182, SEQ ID NO: 183, SEQ ID NO: 184, SEQ ID NO: 185, SEQ ID NO: 186, SEQ ID NO: 187, SEQ ID NO: 188, SEQ ID NO: 189, SEQ ID NO: 190, SEQ ID NO: 191, SEQ ID NO: 192, SEQ ID NO: 193, SEQ ID NO: 194, SEQ ID NO: 195, SEQ ID NO: 196, SEQ ID NO: 197, SEQ ID NO: 198, SEQ ID NO: 199, SEQ ID NO: 200, SEQ ID NO: 201, SEQ ID NO: 202, SEQ ID NO: 203, SEQ ID NO: 204, SEQ ID NO: 205, SEQ ID NO: 206, SEQ ID NO: 207, SEQ ID NO: 208, SEQ ID NO: 209, SEQ ID NO: 210, SEQ ID NO: 211, SEQ ID NO: 212, SEQ ID NO: 213, SEQ ID NO: 214 or SEQ ID NO: 215.

[0196] In some embodiments polynucleotides are provided encoding an IPD099-1 polypeptide comprising the amino acid sequence of SEQ ID NO: 136, SEQ ID NO: 139, SEQ ID NO: 140, SEQ ID NO: 141, SEQ ID NO: 142, SEQ ID NO: 143, SEQ ID NO: 144, SEQ ID NO: 145, SEQ

[0197] ID NO: 146, SEQ ID NO: 147, SEQ ID NO: 148, SEQ ID NO: 149, SEQ ID NO: 150, SEQ ID NO: 151, SEQ ID NO: 152, SEQ ID NO: 153, SEQ ID NO: 154, SEQ ID NO: 155, SEQ ID NO: 156, SEQ ID NO: 157, SEQ ID NO: 158, SEQ ID NO: 159, SEQ ID NO: 160, SEQ ID NO: 161, SEQ ID NO: 162, SEQ ID NO: 163, SEQ ID NO: 164, SEQ ID NO: 165, SEQ ID NO: 166, SEQ ID NO: 167, SEQ ID NO: 168, SEQ ID NO: 169, SEQ ID NO: 170, SEQ ID NO: 171, SEQ ID NO: 172, SEQ ID NO: 173, SEQ ID NO: 174, SEQ ID NO: 175, SEQ ID NO: 176, SEQ ID NO: 177, SEQ ID NO: 178, SEQ ID NO: 179, SEQ ID NO: 180, SEQ ID NO: 181, SEQ ID NO: 182, SEQ ID NO: 183, SEQ ID NO: 184, SEQ ID NO: 185, SEQ ID NO: 186, SEQ ID NO: 187, SEQ ID NO: 188, SEQ ID NO: 189, SEQ ID NO: 190, SEQ ID NO: 191, SEQ ID NO: 192, SEQ ID NO: 193, SEQ ID NO: 194, SEQ ID NO: 195, SEQ ID NO: 196, SEQ ID NO: 197, SEQ ID NO: 198, SEQ ID NO: 199, SEQ ID NO: 200, SEQ ID NO: 201, SEQ ID NO: 202, SEQ ID NO: 203, SEQ ID NO: 204, SEQ ID NO: 205, SEQ ID NO: 206, SEQ ID NO: 207, SEQ ID NO: 208, SEQ ID NO: 209, SEQ ID NO: 210, SEQ ID NO: 211, SEQ ID NO: 212, SEQ ID NO: 213, SEQ ID NO: 214 or SEQ ID NO: 215.

[0198] In some embodiments polynucleotides are provided encoding an IPD099-1 polypeptide comprising the amino acid sequence of SEQ ID NO: 136, SEQ ID NO: 139, SEQ ID NO: 140, SEQ ID NO: 142, SEQ ID NO: 144, SEQ ID NO: 145, SEQ ID NO: 148, SEQ ID NO: 149, SEQ ID NO: 150, SEQ ID NO: 155, SEQ ID NO: 157, SEQ ID NO: 158, SEQ ID NO: 177, SEQ ID NO: 179, SEQ ID NO: 180, SEQ ID NO: 183, SEQ ID NO: 185, SEQ ID NO: 186, SEQ ID NO: 187, SEQ ID NO: 188, SEQ ID NO: 189, SEQ ID NO: 192, SEQ ID NO: 195, SEQ ID NO: 196, SEQ ID NO: 197, SEQ ID NO: 199, SEQ ID NO: 205, SEQ ID NO: 208, SEQ ID NO: 209, SEQ ID NO: 210 or SEQ ID NO: 215.

[0199] In some embodiments polynucleotides are provided, encoding an IPD099-1 polypeptide, comprising the nucleic acid sequence of SEQ ID NO: 591, SEQ ID NO: 594, SEQ ID NO: 595, SEQ ID NO: 596, SEQ ID NO: 597, SEQ ID NO: 598, SEQ ID NO: 599, SEQ ID NO: 600, SEQ ID NO: 601, SEQ ID NO: 602.

### Polynucleotides Encoding IPD099-2 Polypeptides

[0200] Sources of polynucleotides encoding IPD099-2 polypeptide homologs or related proteins include bacterial species selected from but not limited to Aeromonas species, Haemophilus species, Burkholderia species, Chromobacterium species, Erwinia species, Serratia species, Salinivibrio species, Aquimarina species, Janthinobacterium species, Tolypothrix species, Photobacterium species, Janthinobacterium species, Rhizobium species, Moritella species, Providencia species, Yersinia species and Vibrio species.

[0201] In some embodiments polynucleotides are provided encoding an IPD099-2 polypeptide having at least about 70%, 71%, 72%, 73%, 74%, 75%, 76%, 77%, 78%, 79%, 80%, 81%, 82%, 83%, 84%, 85%, 86%, 87%, 88%, 89%, 90%, 91%, 92%, 93%, 94%, 95%, 96%, 97%, 98%, 99% or greater identity across the entire length of the amino acid sequence of SEQ ID NO: 137, SEQ ID NO: 216, SEQ ID NO: 217, SEQ ID NO: 218, SEQ ID NO: 219, SEQ ID NO: 220, SEQ ID NO: 221, SEQ ID NO: 222, SEQ ID NO: 223, SEQ ID NO: 224, SEQ ID NO: 225, SEQ ID NO: 226, SEQ ID NO: 227, SEQ ID NO: 228, SEQ ID NO: 229, SEQ ID NO: 230, SEQ ID NO: 231, SEQ ID NO: 232, SEQ ID NO: 233, SEQ ID NO: 234, SEQ ID NO: 235, SEQ ID NO: 236, SEQ ID NO: 237, SEQ ID NO: 238, SEQ ID NO: 239, SEQ ID NO: 240, SEQ ID NO: 241, SEQ ID NO: 242, SEQ ID NO: 243, SEQ ID NO: 244, SEQ ID NO: 245, SEQ ID NO: 246, SEQ ID NO: 247, SEQ ID NO: 248, SEQ ID NO: 249, SEQ ID NO: 250, SEQ ID NO: 251, SEQ ID NO: 252, SEQ ID NO: 253, SEQ ID NO: 254, SEQ ID NO: 255, SEQ ID NO: 256, SEQ ID NO: 257, SEQ ID NO: 258, SEQ ID NO: 259, SEQ ID NO: 260, SEQ ID NO: 261, SEQ ID NO: 262, SEQ ID NO: 263, SEQ ID NO: 264, SEQ ID NO: 265, SEQ ID NO: 266, SEQ ID NO: 267, SEQ ID NO: 268, SEQ ID NO: 269, SEQ ID NO: 270 or SEQ ID NO: 271.

[0202] In some embodiments polynucleotides are provided encoding an IPD099-2 polypeptide comprising an amino acid sequence having at least 95%, 95.5% 96%, 96.5%, 97%, 97%.5%, 98%, 98.1%, 98.2%, 98.3%, 98.4%, 98.5%, 98.6%, 98.7%, 98.8%, 98.9%, 99%, 99.1%, 99.2%, 99.3%, 99.4%, 99.5%, 99.6%, 99.7%, 99.8%, 99.9% or greater identity across the entire length of the amino acid sequence of SEQ ID NO: 137, SEQ ID NO: 216, SEQ ID NO: 221, SEQ ID NO: 222, SEQ ID NO: 225, SEQ ID NO: 227, SEQ ID NO: 230, SEQ ID NO: 232, SEQ ID NO: 244, SEQ ID NO: 246, SEQ ID NO: 249, SEQ ID NO: 251, SEQ ID NO: 254, SEQ ID NO: 255, SEQ ID NO: 262, SEQ ID NO: 265, SEQ ID NO: 268 or SEQ ID NO: 269.

[0203] In some embodiments polynucleotides are provided encoding an IPD099-2 polypeptide comprising an amino acid sequence of SEQ ID NO: 137, SEQ ID NO: 216, SEQ ID NO: 217, SEQ ID NO: 218, SEQ ID NO: 219, SEQ ID NO: 220, SEQ ID NO: 221, SEQ ID NO: 222, SEQ ID NO: 223, SEQ ID NO: 224, SEQ ID NO: 225, SEQ ID NO: 226, SEQ ID NO: 227, SEQ ID NO: 228, SEQ ID NO: 229, SEQ ID NO: 230, SEQ ID NO: 231, SEQ ID NO: 232, SEQ ID NO: 233, SEQ ID NO: 234, SEQ ID NO: 235, SEQ ID NO: 236, SEQ ID NO: 237, SEQ ID NO: 238, SEQ ID NO: 239, SEQ ID NO: 240, SEQ ID NO: 241, SEQ ID NO: 242, SEQ ID NO: 243, SEQ ID NO: 244, SEQ ID NO: 245, SEQ ID NO: 246, SEQ ID NO: 247, SEQ ID NO: 248, SEQ ID NO: 249, SEQ ID NO: 250, SEQ ID NO: 251, SEQ ID NO: 252, SEQ ID NO: 253, SEQ ID NO: 254, SEQ ID NO: 255, SEQ ID NO: 256, SEQ ID NO: 257, SEQ ID NO: 258, SEQ ID NO: 259, SEQ ID NO: 260, SEQ ID NO: 261, SEQ ID NO: 262, SEQ ID NO: 263, SEQ ID NO: 264, SEQ ID NO: 265, SEQ ID NO: 266, SEQ ID NO: 267, SEQ ID NO: 268, SEQ ID NO: 269, SEQ ID NO: 270 or SEQ ID NO: 271 having 1, 2, 3, 4, 5, 6, 7, 8, 9, 10 11, 12, 13, 14, 15, 16, 17, 18, 19, 20, 21, 22, 23, 24, 25, 26, 27, 28, 29, 30, 31, 32, 33, 34, 35, 36, 37, 38, 39, 40, 41, 42, 43, 44, 45, 46, 47, 48, 49, 50, 51, 52, 53, 54, 55, 56, 57, 58, 59, 60, 61, 62, 63, 64, 65, 66, 67, 68, 69, 70 or more amino acid substitutions compared to the native amino acid at the corresponding position of SEQ ID NO: 137, SEQ ID NO: 216, SEQ ID NO: 217, SEQ ID NO: 218, SEQ ID NO: 219, SEQ ID NO: 220, SEQ ID NO: 221, SEQ ID NO: 222, SEQ ID NO: 223, SEQ ID NO: 224, SEQ ID NO: 225, SEQ ID NO: 226, SEQ ID NO: 227, SEQ ID NO: 228, SEQ ID NO: 229, SEQ ID NO: 230, SEQ ID NO: 231, SEQ ID NO: 232, SEQ ID NO: 233, SEQ ID NO: 234, SEQ ID NO: 235, SEQ ID NO: 236, SEQ ID NO: 237, SEQ ID NO: 238, SEQ ID NO: 239, SEQ ID NO: 240, SEQ ID NO: 241, SEQ ID NO: 242, SEQ ID NO: 243, SEQ ID NO: 244, SEQ ID NO: 245, SEQ ID NO: 246, SEQ ID NO: 247, SEQ ID NO: 248, SEQ ID NO: 249, SEQ ID NO: 250, SEQ ID NO: 251, SEQ ID NO: 252, SEQ ID NO: 253, SEQ ID NO: 254, SEQ ID NO: 255, SEQ ID NO: 256, SEQ ID NO: 257, SEQ ID NO: 258, SEQ ID NO: 259, SEQ ID NO: 260, SEQ ID NO: 261, SEQ ID NO: 262, SEQ ID NO: 263, SEQ ID NO: 264, SEQ ID NO: 265, SEQ ID NO: 266, SEQ ID NO: 267, SEQ ID NO: 268, SEQ ID NO: 269, SEQ ID NO: 270 or SEQ ID NO: 271.

[0204] In some embodiments polynucleotides are provided encoding an IPD099-2 polypeptide comprising the amino acid sequence of SEQ ID NO: 137, SEQ ID NO: 216, SEQ ID NO: 217, SEQ ID NO: 218, SEQ ID NO: 219, SEQ ID NO: 220, SEQ ID NO: 221, SEQ ID NO: 222, SEQ ID NO: 223, SEQ ID NO: 224, SEQ ID NO: 225, SEQ ID NO: 226, SEQ ID NO: 227, SEQ ID NO: 228, SEQ ID NO: 229, SEQ ID NO: 230, SEQ ID NO: 231, SEQ ID NO: 232, SEQ ID NO: 233, SEQ ID NO: 234, SEQ ID NO: 235, SEQ ID NO: 236, SEQ ID NO: 237, SEQ ID NO: 238, SEQ ID NO: 239, SEQ ID NO: 240, SEQ ID NO: 241, SEQ ID NO: 242, SEQ ID NO: 243, SEQ ID NO: 244, SEQ ID NO: 245, SEQ ID NO: 246, SEQ ID NO: 247, SEQ ID NO: 248, SEQ ID NO: 249, SEQ ID NO: 250, SEQ ID NO: 251, SEQ ID NO: 252, SEQ ID NO: 253, SEQ ID NO: 254, SEQ ID NO: 255, SEQ ID NO: 256, SEQ ID NO: 257, SEQ ID NO: 258, SEQ ID NO: 259, SEQ ID NO: 260, SEQ ID NO: 261, SEQ ID NO: 262, SEQ ID NO: 263, SEQ ID NO: 264, SEQ ID NO: 265, SEQ ID NO: 266, SEQ ID NO: 267, SEQ ID NO: 268, SEQ ID NO: 269, SEQ ID NO: 270 or SEQ ID NO: 271.

[0205] In some embodiments polynucleotides are provided encoding an IPD099-2 polypeptide comprising the amino acid sequence of SEQ ID NO: 137, SEQ ID NO: 216, SEQ ID NO: 221, SEQ ID NO: 222, SEQ ID NO: 225, SEQ ID NO: 227, SEQ ID NO: 230, SEQ ID NO: 232, SEQ ID NO: 244, SEQ ID NO: 246, SEQ ID NO: 249, SEQ ID NO: 251, SEQ ID NO: 254, SEQ ID NO: 255, SEQ ID NO: 262, SEQ ID NO: 265, SEQ ID NO: 268 or SEQ ID NO: 269.

[0206] In some embodiments polynucleotides are provided, encoding an IPD099-2 polypeptide, comprising the nucleic acid sequence of SEQ ID NO: 592, SEQ ID NO: 603 or SEQ ID NO: 605.

### Polynucleotides Encoding IPD099-3 Ppolypeptides

[0207] Sources of polynucleotides encoding IPD099-3 polypeptide homologs or related proteins include bacterial species selected from but not limited to Aeromonas species, Haemophilus species, Burkholderia species, Chromobacterium species, Erwinia species, Serratia species, Salinivibrio species, Aquimarina species, Janthinobacterium species, Tolypothrix species, Photobacterium species, Janthinobacterium species, Rhizobium species, Moritella species, Providencia species, Yersinia species and Vibrio species.

[0208] In some embodiments polynucleotides are provide encoding an IPD099-3 polypeptide comprising an amino acid sequence having at least about 70%, 71%, 72%, 73%, 74%, 75%, 76%, 77%, 78%, 79%, 80%, 81%, 82%, 83%, 84%, 85%, 86%, 87%, 88%, 89%, 90%, 91%, 92%, 93%, 94%, 95%, 96%, 97%, 98%, 99% or greater identity across the entire length of the amino acid sequence of SEQ ID NO: 138, SEQ ID NO: 272, SEQ ID NO: 273, SEQ ID NO: 274, SEQ ID NO: 275, SEQ ID NO: 276, SEQ ID NO: 277, SEQ ID NO: 278, SEQ ID NO: 279, SEQ ID NO: 280, SEQ ID NO: 281, SEQ ID NO: 282, SEQ ID NO: 283, SEQ ID NO: 284, SEQ ID NO: 285, SEQ ID NO: 286, SEQ ID NO: 287, SEQ ID NO: 288, SEQ ID NO: 289, SEQ ID NO: 290, SEQ ID NO: 291, SEQ ID NO: 292, SEQ ID NO: 293, SEQ ID NO: 294, SEQ ID NO: 295, SEQ ID NO: 296, SEQ ID NO: 297, SEQ ID NO: 298, SEQ ID NO: 299, SEQ ID NO: 300, SEQ ID NO: 301, SEQ ID NO: 302, SEQ ID NO: 303, SEQ ID NO: 304, SEQ ID NO: 305, SEQ ID NO: 306, SEQ ID NO: 307, SEQ ID NO: 308, SEQ ID NO: 309, SEQ ID NO: 310, SEQ ID NO: 311, SEQ ID NO: 312, SEQ ID NO: 313, SEQ ID NO: 314, SEQ ID NO: 315, SEQ ID NO: 316, SEQ ID NO: 317, SEQ ID NO: 318, SEQ ID NO: 319, SEQ ID NO: 320, SEQ ID NO: 321, SEQ ID NO: 322, SEQ ID NO: 323, SEQ ID NO: 324, SEQ ID NO: 325, SEQ ID NO: 326, SEQ ID NO: 327, SEQ ID NO: 328, SEQ ID NO: 329, SEQ ID NO: 330 or SEQ ID NO: 331.

[0209] In some embodiments polynucleotides are provided encoding an IPD099-3 polypeptide comprising an amino acid sequence having at least 95%, 95.5% 96%, 96.5%, 97%, 97%.5%, 98%, 98.1%, 98.2%, 98.3%, 98.4%, 98.5%, 98.6%, 98.7%, 98.8%, 98.9%, 99%, 99.1%, 99.2%, 99.3%, 99.4%, 99.5%, 99.6%, 99.7%, 99.8%, 99.9% or greater identity across the entire length of the amino acid sequence of SEQ ID NO: 138, SEQ ID NO: 272, SEQ ID NO: 273, SEQ ID NO: 275, SEQ ID NO: 285, SEQ ID NO: 286, SEQ ID NO: 288, SEQ ID NO: 289, SEQ ID NO: 290, SEQ ID NO: 291, SEQ ID NO: 292, SEQ ID NO: 293, SEQ ID NO: 294, SEQ ID NO: 295, SEQ ID NO: 296, SEQ ID NO: 298, SEQ ID NO: 299, SEQ ID NO: 300, SEQ ID NO: 301, SEQ ID NO: 302, SEQ ID NO: 304, SEQ ID NO: 306, SEQ ID NO: 307, SEQ ID NO: 308, SEQ ID NO: 312, SEQ ID NO: 313, SEQ ID NO: 320, SEQ ID NO: 323, SEQ ID NO: 324, SEQ ID NO: 326 or SEQ ID NO: 331.

[0210] In some embodiments polynucleotides are provided encoding an IPD099-3 polypeptide comprising an amino acid sequence of SEQ ID NO: 138, SEQ ID NO: 272, SEQ ID NO: 273, SEQ ID NO: 274, SEQ ID NO: 275, SEQ ID NO: 276, SEQ ID NO: 277, SEQ ID NO: 278, SEQ ID NO: 279, SEQ ID NO: 280, SEQ ID NO: 281, SEQ ID NO: 282, SEQ ID NO: 283, SEQ ID NO: 284, SEQ ID NO: 285, SEQ ID NO: 286, SEQ ID NO: 287, SEQ ID NO: 288, SEQ ID NO: 289, SEQ ID NO: 290, SEQ ID NO: 291, SEQ ID NO: 292, SEQ ID NO: 293, SEQ ID NO: 294, SEQ ID NO: 295, SEQ ID NO: 296, SEQ ID NO: 297, SEQ ID NO: 298, SEQ ID NO: 299, SEQ ID NO: 300, SEQ ID NO: 301, SEQ ID NO: 302, SEQ ID NO: 303, SEQ ID NO: 304, SEQ ID NO: 305, SEQ ID NO: 306, SEQ ID NO: 307, SEQ ID NO: 308, SEQ ID NO: 309, SEQ ID NO: 310, SEQ ID NO: 311, SEQ ID NO: 312, SEQ ID NO: 313, SEQ ID NO: 314, SEQ ID NO: 315, SEQ ID NO: 316, SEQ ID NO: 317, SEQ ID NO: 318, SEQ ID NO: 319, SEQ ID NO: 320, SEQ ID NO: 321, SEQ ID NO: 322, SEQ ID NO: 323, SEQ ID NO: 324, SEQ ID NO: 325, SEQ ID NO: 326, SEQ ID NO: 327, SEQ ID NO: 328, SEQ ID NO: 329, SEQ ID NO: 330 or SEQ ID NO: 331 having 1, 2, 3, 4, 5, 6, 7, 8, 9, 10 11, 12, 13, 14, 15, 16, 17, 18, 19, 20, 21, 22, 23, 24, 25, 26, 27, 28, 29, 30, 31, 32, 33, 34, 35, 36, 37, 38, 39, 40, 41, 42, 43, 44, 45, 46, 47, 48, 49, 50, 51, 52, 53, 54, 55, 56, 57, 58, 59, 60, 61, 62, 63, 64, 65, 66, 67, 68, 69, 70, 71, 72, 73, 74, 75, 76, 77, 78, 79, 80, 81, 82, 83, 84, 85, 86, 87, 88, 89, 90 or more amino acid substitutions compared to the native amino acid at the corresponding position of SEQ ID NO: 138, SEQ ID NO: 272, SEQ ID NO: 273, SEQ ID NO: 274, SEQ ID NO: 275, SEQ ID NO: 276, SEQ ID NO: 277, SEQ ID NO: 278, SEQ ID NO: 279, SEQ ID NO: 280, SEQ ID NO: 281, SEQ ID NO: 282, SEQ ID NO: 283, SEQ ID NO: 284, SEQ ID NO: 285, SEQ ID NO: 286, SEQ ID NO: 287, SEQ ID NO: 288, SEQ ID NO: 289, SEQ ID NO: 290, SEQ ID NO: 291, SEQ ID NO: 292, SEQ ID NO: 293, SEQ ID NO: 294, SEQ ID NO: 295, SEQ ID NO: 296, SEQ ID NO: 297, SEQ ID NO: 298, SEQ ID NO: 299, SEQ ID NO: 300, SEQ ID NO: 301, SEQ ID NO: 302, SEQ ID NO: 303, SEQ ID NO: 304, SEQ ID NO: 305, SEQ ID NO: 306, SEQ ID NO: 307, SEQ ID NO: 308, SEQ ID NO: 309, SEQ ID NO: 310, SEQ ID NO: 311, SEQ ID NO: 312, SEQ ID NO: 313, SEQ ID NO: 314, SEQ ID NO: 315, SEQ ID NO: 316, SEQ ID NO: 317, SEQ ID NO: 318, SEQ ID NO: 319, SEQ ID NO: 320, SEQ ID NO: 321, SEQ ID NO: 322, SEQ ID NO: 323, SEQ ID NO: 324, SEQ ID NO: 325, SEQ ID NO: 326, SEQ ID NO: 327, SEQ ID NO: 328, SEQ ID NO: 329, SEQ ID NO: 330 or SEQ ID NO: 331.

[0211] In some embodiments polynucleotides are provided the encode an IPD099-3 polypeptide comprising the amino acid sequence of SEQ ID NO: 138, SEQ ID NO: 272, SEQ ID NO: 273, SEQ ID NO: 274, SEQ ID NO: 275, SEQ ID NO: 276, SEQ ID NO: 277, SEQ ID NO: 278, SEQ ID NO: 279, SEQ ID NO: 280, SEQ ID NO: 281, SEQ ID NO: 282, SEQ ID NO: 283, SEQ ID NO: 284, SEQ ID NO: 285, SEQ ID NO: 286, SEQ ID NO: 287, SEQ ID NO: 288, SEQ ID NO: 289, SEQ ID NO: 290, SEQ ID NO: 291, SEQ ID NO: 292, SEQ ID NO: 293, SEQ ID NO: 294, SEQ ID NO: 295, SEQ ID NO: 296, SEQ ID NO: 297, SEQ ID NO: 298, SEQ ID NO: 299, SEQ ID NO: 300, SEQ ID NO: 301, SEQ ID NO: 302, SEQ ID NO: 303, SEQ ID NO: 304, SEQ ID NO: 305, SEQ ID NO: 306, SEQ ID NO: 307, SEQ ID NO: 308, SEQ ID NO: 309, SEQ ID NO: 310, SEQ ID NO: 311, SEQ ID NO: 312, SEQ ID NO: 313, SEQ ID NO: 314, SEQ ID NO: 315, SEQ ID NO: 316, SEQ ID NO: 317, SEQ ID NO: 318, SEQ ID NO: 319, SEQ ID NO: 320, SEQ ID NO: 321, SEQ ID NO: 322, SEQ ID NO: 323, SEQ ID NO: 324, SEQ ID NO: 325, SEQ ID NO: 326, SEQ ID NO: 327, SEQ ID NO: 328, SEQ ID NO: 329, SEQ ID NO: 330 or SEQ ID NO: 331.

[0212] In some embodiments polynucleotides are provided encoding an IPD099-3 polypeptide comprising the amino acid sequence of SEQ ID NO: 138, SEQ ID NO: 272, SEQ ID NO: 273, SEQ ID NO: 275, SEQ ID NO: 285, SEQ ID NO: 286, SEQ ID NO: 288, SEQ ID NO: 289, SEQ ID NO: 290, SEQ ID NO: 291, SEQ ID NO: 292, SEQ ID NO: 293, SEQ ID NO: 294, SEQ ID NO: 295, SEQ ID NO: 296, SEQ ID NO: 298, SEQ ID NO: 299, SEQ ID NO: 300, SEQ ID NO: 301, SEQ ID NO: 302, SEQ ID NO: 304, SEQ ID NO: 306, SEQ ID NO: 307, SEQ ID NO: 308, SEQ ID NO: 312, SEQ ID NO: 313, SEQ ID NO: 320, SEQ ID NO: 323, SEQ ID NO: 324, SEQ ID NO: 326, SEQ ID NO: 331.

[0213] In some embodiments polynucleotides are provided, encoding an IPD099-3 polypeptide, comprising the nucleic acid sequence of SEQ ID NO: 593, SEQ ID NO: 605, SEQ ID NO: 606, SEQ ID NO: 607, SEQ ID NO: 608, SEQ ID NO; 609 or SEQ ID NO: 610.

### Polynucleotides Encoding IPD100-1 Polypeptides

[0214] Sources of polynucleotides encoding IPD100-1 polypeptide homologs or related proteins include bacterial species selected from but not limited to Pseudomonas species, Candidatus species, Burkholderia species, Duganella species, Salmonella species, Tenacibaculum species, Dickeya species, Pedobacter species, and Mycobacterium species.

[0215] In some embodiments polynucleotides are provided encoding an IPD100-1 polypeptide having at least about 70%, 71%, 72%, 73%, 74%, 75%, 76%, 77%, 78%, 79%, 80%, 81%, 82%, 83%, 84%, 85%, 86%, 87%, 88%, 89%, 90%, 91%, 92%, 93%, 94%, 95%, 96%, 97%, 98%, 99% or greater identity across the entire length of the amino acid sequence of SEQ ID NO: 332, SEQ ID NO: 334, SEQ ID NO: 335 or SEQ ID NO: 336.

[0216] In some embodiments polynucleotide are provided encoding an IPD100-1 polypeptide comprising an amino acid sequence having at least 95%, 95.5% 96%, 96.5%, 97%, 97%.5%, 98%, 98.1%, 98.2%, 98.3%, 98.4%, 98.5%, 98.6%, 98.7%, 98.8%, 98.9%, 99%, 99.1%, 99.2%, 99.3%, 99.4%, 99.5%, 99.6%, 99.7%, 99.8%, 99.9% or greater identity across the entire length of the amino acid sequence of SEQ ID NO: 332.

[0217] In some embodiments polynucleotides are provided encoding an IPD100-1 polypeptide comprising an amino acid sequence of SEQ ID NO: 332, SEQ ID NO: 334, SEQ ID NO: 335 or SEQ ID NO: 336 having 1, 2, 3, 4, 5, 6, 7, 8, 9, 10 11, 12, 13, 14, 15, 16, 17, 18, 19, 20, 21, 22, 23, 24, 25, 26, 27, 28, 29, 30, 31, 32, 33, 34, 35, 36, 37, 38, 39, 40, 41, 42, 43, 44, 45, 46, 47, 48, 49, 50, 51, 52, 53, 54, 55, 56, 57, 58, 59, 60, 61, 62, 63, 64, 65, 66, 67, 68, 69, 70, 71, 72, 73, 74, 75 or more amino acid substitutions compared to the native amino acid at the corresponding position of SEQ ID NO: 332, SEQ ID NO: 334, SEQ ID NO: 335 or SEQ ID NO: 336.

[0218] In some embodiments polynucleotides are provided encoding an IPD100-1 polypeptide comprising the amino acid sequence of SEQ ID NO: 332, SEQ ID NO: 334, SEQ ID NO: 335 or SEQ ID NO: 336.

[0219] In some embodiments polynucleotides are provided encoding an IPD100-1 polypeptide comprising the amino acid sequence of SEQ ID NO: 332.

[0220] In some embodiments polynucleotides are provided, encoding an IPD100-1 polypeptide, comprising the nucleic acid sequence of SEQ ID NO: 611.

### Polynucleotides Encoding IPD100-2 Polypeptides

[0221] Sources of polynucleotides encoding IPD100-2 polypeptide homologs or related proteins include bacterial species selected from but not limited to Pseudomonas species, Candidatus species, Burkholderia species, Duganella species, Salmonella species, Tenacibaculum species, Dickeya species, Pedobacter species, and Mycobacterium species.

[0222] In some embodiments polynucleotides are provided encoding an IPD100-2 polypeptide comprising an amino acid sequence having at least about 70%, 71%, 72%, 73%, 74%, 75%, 76%, 77%, 78%, 79%, 80%, 81%, 82%, 83%, 84%, 85%, 86%, 87%, 88%, 89%, 90%, 91%, 92%, 93%, 94%, 95%, 96%, 97%, 98%, 99% or greater identity across the entire length of the amino acid sequence of SEQ ID NO: 333, SEQ ID NO: 337, SEQ ID NO: 338, SEQ ID NO: 339, SEQ ID NO: 340, SEQ ID NO: 341, SEQ ID NO: 342, SEQ ID NO: 343, SEQ ID NO: 344, SEQ ID NO: 345, SEQ ID NO: 346, SEQ ID NO: 347, SEQ ID NO: 348 or SEQ ID NO: 349.

[0223] In some embodiments polynucleotides are provided encoding an IPD100-2 polypeptide comprising an amino acid sequence having at least 95%, 95.5% 96%, 96.5%, 97%, 97%.5%, 98%, 98.1%, 98.2%, 98.3%, 98.4%, 98.5%, 98.6%, 98.7%, 98.8%, 98.9%, 99%, 99.1%, 99.2%, 99.3%, 99.4%, 99.5%, 99.6%, 99.7%, 99.8%, 99.9% or greater identity across the entire length of the amino acid sequence of SEQ ID NO: 333, SEQ ID NO: 337, SEQ ID NO: 338, SEQ ID NO: 341, SEQ ID NO: 342, SEQ ID NO: 343, SEQ ID NO: 344 or SEQ ID NO: 347.

[0224] In some embodiments polynucleotides are provided encoding an IPD100-2 polypeptide comprising an amino acid sequence of SEQ ID NO: 333, SEQ ID NO: 337, SEQ ID NO: 338, SEQ ID NO: 339, SEQ ID NO: 340, SEQ ID NO: 341, SEQ ID NO: 342, SEQ ID NO: 343, SEQ ID NO: 344, SEQ ID NO: 345, SEQ ID NO: 346, SEQ ID NO: 347, SEQ ID NO: 348 or SEQ ID NO: 349 having 1, 2, 3, 4, 5, 6, 7, 8, 9, 10 11, 12, 13, 14, 15, 16, 17, 18, 19, 20, 21, 22, 23, 24, 25, 26, 27, 28, 29, 30, 31, 32, 33, 34, 35, 36, 37, 38, 39, 40, 41, 42, 43, 44, 45, 46, 47, 48, 49, 50, 51, 52, 53, 54, 55, 56, 57, 58, 59, 60, 61, 62, 63, 64, 65, 66, 67, 68, 69, 70, 71, 72, 73, 74, 75, 76, 77, 78, 79, 80, 81, 82, 83, 84, 85, 86, 87, 88, 89, 90 or more amino acid substitutions compared to the native amino acid at the corresponding position of SEQ ID NO: 333, SEQ ID NO: 337, SEQ ID NO: 338, SEQ ID NO: 339, SEQ ID NO: 340, SEQ ID NO: 341, SEQ ID NO: 342, SEQ ID NO: 343, SEQ ID NO: 344, SEQ ID NO: 345, SEQ ID NO: 346, SEQ ID NO: 347, SEQ ID NO: 348 or SEQ ID NO: 349.

[0225] In some embodiments polynucleotides are provided encoding an IPD100-2 polypeptide comprising the amino acid sequence of SEQ ID NO: 333, SEQ ID NO: 337, SEQ ID NO: 338, SEQ ID NO: 339, SEQ ID NO: 340, SEQ ID NO: 341, SEQ ID NO: 342, SEQ ID NO: 343, SEQ ID NO: 344, SEQ ID NO: 345, SEQ ID NO: 346, SEQ ID NO: 347, SEQ ID NO: 348 or SEQ ID NO: 349.

[0226] In some embodiments polynucleotides are provided encoding an IPD100-2 polypeptide comprising the amino acid sequence of SEQ ID NO: 333, SEQ ID NO: 337, SEQ ID NO: 338, SEQ ID NO: 341, SEQ ID NO: 342, SEQ ID NO: 343, SEQ ID NO: 344 or SEQ ID NO: 347.

[0227] In some embodiments polynucleotides are provided, encoding an IPD100-2 polypeptide, comprising the nucleic acid sequence of SEQ ID NO: 612 or SEQ ID NO: 613.

### Polynucleotides Encoding IPD105 Polypeptides

[0228] Sources of polynucleotides encoding IPD105 polypeptide homologs or related proteins include bacterial species selected from but not limited to Chromobacterium species and Pseudogulbenkiania l species.

[0229] In some embodiments polynucleotides are provided encoding an IPD105 polypeptide having at least about 70%, 71%, 72%, 73%, 74%, 75%, 76%, 77%, 78%, 79%, 80%, 81%, 82%, 83%, 84%, 85%, 86%, 87%, 88%, 89%, 90%, 91%, 92%, 93%, 94%, 95%, 96%, 97%, 98%, 99% or greater identity across the entire length of the amino acid sequence of SEQ ID NO: 350, SEQ ID NO: 351, SEQ ID NO: 352, SEQ ID NO: 353, SEQ ID NO: 354, SEQ ID NO: 355, SEQ ID NO: 356, SEQ ID NO: 357, SEQ ID NO: 358, SEQ ID NO: 359, SEQ ID NO: 360, SEQ ID NO: 361, SEQ ID NO: 362, SEQ ID NO: 363, SEQ ID NO: 364 or SEQ ID NO: 365.

[0230] In some embodiments polynucleotides are provided encoding an IPD105 polypeptide comprising an amino acid sequence having at least 95%, 95.5% 96%, 96.5%, 97%, 97%.5%, 98%, 98.1%, 98.2%, 98.3%, 98.4%, 98.5%, 98.6%, 98.7%, 98.8%, 98.9%, 99%, 99.1%, 99.2%, 99.3%, 99.4%, 99.5%, 99.6%, 99.7%, 99.8%, 99.9% or greater identity across the entire length of the amino acid sequence of SEQ ID NO: 350, SEQ ID NO: 353, SEQ ID NO: 355, SEQ ID NO: 357 or SEQ ID NO: 362.

[0231] In some embodiments polynucleotides are provided encoding an IPD105 polypeptide comprising an amino acid sequence of SEQ ID NO: 350, SEQ ID NO: 351, SEQ ID NO: 352, SEQ ID NO: 353, SEQ ID NO: 354, SEQ ID NO: 355, SEQ ID NO: 356, SEQ ID NO: 357, SEQ ID NO: 358, SEQ ID NO: 359, SEQ ID NO: 360, SEQ ID NO: 361, SEQ ID NO: 362, SEQ ID NO: 363, SEQ ID NO: 364 or SEQ ID NO: 365 having 1, 2, 3, 4, 5, 6, 7, 8, 9, 10 11, 12, 13, 14, 15, 16, 17, 18, 19, 20, 21, 22, 23, 24, 25, 26, 27, 28, 29, 30, 31, 32, 33, 34, 35, 36, 37, 38, 39, 40, 41, 42, 43, 44, 45, 46, 47, 48, 49, 50, 51, 52, 53, 54, 55, 56, 57, 58, 59, 60, 61, 62, 63, 64, 65, 66, 67, 68, 69, 70 or more amino acid substitutions compared to the native amino acid at the corresponding position of SEQ ID NO: 350, SEQ ID NO: 351, SEQ ID NO: 352, SEQ ID NO: 353, SEQ ID NO: 354, SEQ ID NO: 355, SEQ ID NO: 356, SEQ ID NO: 357, SEQ ID NO: 358, SEQ ID NO: 359, SEQ ID NO: 360, SEQ ID NO: 361, SEQ ID NO: 362, SEQ ID NO: 363, SEQ ID NO: 364 or SEQ ID NO: 365.

[0232] In some embodiments polynucleotides are provided encoding an IPD105 polypeptide comprising the amino acid sequence of SEQ ID NO: 350, SEQ ID NO: 351, SEQ ID NO: 352, SEQ ID NO: 353, SEQ ID NO: 354, SEQ ID NO: 355, SEQ ID NO: 356, SEQ ID NO: 357, SEQ ID NO: 358, SEQ ID NO: 359, SEQ ID NO: 360, SEQ ID NO: 361, SEQ ID NO: 362, SEQ ID NO: 363, SEQ ID NO: 364 or SEQ ID NO: 365.

[0233] In some embodiments polynucleotides are provided encoding an IPD105 polypeptide comprising the amino acid sequence of SEQ ID NO: 350, SEQ ID NO: 353, SEQ ID NO: 355, SEQ ID NO: 357 or SEQ ID NO: 362.

[0234] In some embodiments polynucleotides are provided, encoding an IPD105 polypeptide, comprising the nucleic acid sequence of SEQ ID NO: 614, SEQ ID NO: 615 or SEQ ID NO: 616.

### Polynucleotides Encoding IPD106-1 Polypeptides

[0235] Sources of polynucleotides encoding IPD106-1 polypeptide homologs or related proteins include bacterial species selected from but not limited to Arsenicibacter species and Chitinophaga species.

[0236] In some embodiments polynucleotides are provided encoding an IPD106-1 polypeptide having at least about 70%, 71%, 72%, 73%, 74%, 75%, 76%, 77%, 78%, 79%, 80%, 81%, 82%, 83%, 84%, 85%, 86%, 87%, 88%, 89%, 90%, 91%, 92%, 93%, 94%, 95%, 96%, 97%, 98%, 99% or greater identity across the entire length of the amino acid sequence of SEQ ID NO: 366, SEQ ID NO: 368, SEQ ID NO: 369, SEQ ID NO: 370 or SEQ ID NO: 371.

[0237] In some embodiments polynucleotides are provided encoding an IPD106-1 polypeptide comprising an amino acid sequence having at least 95%, 95.5% 96%, 96.5%, 97%, 97%.5%, 98%, 98.1%, 98.2%, 98.3%, 98.4%, 98.5%, 98.6%, 98.7%, 98.8%, 98.9%, 99%, 99.1%, 99.2%, 99.3%, 99.4%, 99.5%, 99.6%, 99.7%, 99.8%, 99.9% or greater identity across the entire length of the amino acid sequence of SEQ ID NO: 366, SEQ ID NO: 368 or SEQ ID NO: 369.

[0238] In some embodiments polynucleotides are provided encoding an IPD106-1 polypeptide comprising an amino acid sequence of SEQ ID NO: 366, SEQ ID NO: 368, SEQ ID NO: 369, SEQ ID NO: 370 or SEQ ID NO: 371 having 1, 2, 3, 4, 5, 6, 7, 8, 9, 10 11, 12, 13, 14, 15, 16, 17, 18, 19, 20, 21, 22, 23, 24, 25, 26, 27, 28, 29, 30, 31, 32, 33, 34, 35, 36, 37, 38, 39, 40, 41, 42, 43, 44, 45, 46, 47, 48, 49, 50, 51, 52, 53, 54, 55, 56, 57, 58, 59, 60, 61, 62, 63, 64, 65, 66, 67, 68, 69, 70, 71, 72, 73, 74, 75, 76, 77, 78, 79, 80, 81, 82, 83, 84, 85, 86, 87, 88, 89, 90 or more amino acid substitutions compared to the native amino acid at the corresponding position of SEQ ID NO: 366, SEQ ID NO: 368, SEQ ID NO: 369, SEQ ID NO: 370 or SEQ ID NO: 371.

[0239] In some embodiments polynucleotides are provided the encode an IPD106-1 polypeptide comprising the amino acid sequence of SEQ ID NO: 366, SEQ ID NO: 368, SEQ ID NO: 369, SEQ ID NO: 370 or SEQ ID NO: 371.

[0240] In some embodiments polynucleotides are provided encoding an IPD106-1 polypeptide comprising the amino acid sequence of SEQ ID NO: 366, SEQ ID NO: 368 or SEQ ID NO: 369.

[0241] In some embodiments polynucleotides are provided, encoding an IPD105 polypeptide, comprising the nucleic acid sequence of SEQ ID NO: 617 or SEQ ID NO: 619.

### Polynucleotides Encoding IPD106-2 Polypeptides

[0242] Sources of polynucleotides encoding IPD106-2 polypeptide homologs or related proteins include bacterial species selected from but not limited to Arsenicibacter species and Chitinophaga species.

[0243] In some embodiments polynucleotides are provided encoding an IPD106-2 polypeptide comprising an amino acid sequence having at least about 70%, 71%, 72%, 73%, 74%, 75%, 76%, 77%, 78%, 79%, 80%, 81%, 82%, 83%, 84%, 85%, 86%, 87%, 88%, 89%, 90%, 91%, 92%, 93%, 94%, 95%, 96%, 97%, 98%, 99% or greater identity across the entire length of the amino acid sequence of SEQ ID NO: 367, SEQ ID NO: 372, SEQ ID NO: 373, SEQ ID NO: 374, SEQ ID NO: 375 or SEQ ID NO: 376.

[0244] In some embodiments polynucleotides are provide encoding an IPD106-2 polypeptide comprising an amino acid sequence having at least 95%, 95.5% 96%, 96.5%, 97%, 97%.5%, 98%, 98.1%, 98.2%, 98.3%, 98.4%, 98.5%, 98.6%, 98.7%, 98.8%, 98.9%, 99%, 99.1%, 99.2%, 99.3%, 99.4%, 99.5%, 99.6%, 99.7%, 99.8%, 99.9% or greater identity across the entire length of the amino acid sequence of SEQ ID NO: 367, SEQ ID NO: 372, SEQ ID NO: 373 or SEQ ID NO: 376.

[0245] In some embodiments polynucleotides are provided encoding an IPD106-2 polypeptide comprising an amino acid sequence of SEQ ID NO: 367, SEQ ID NO: 372, SEQ ID NO: 373, SEQ ID NO: 374, SEQ ID NO: 375 or SEQ ID NO: 376 having 1, 2, 3, 4, 5, 6, 7, 8, 9, 10 11, 12, 13, 14, 15, 16, 17, 18, 19, 20, 21, 22, 23, 24, 25, 26, 27, 28, 29, 30, 31, 32, 33, 34, 35, 36, 37, 38, 39, 40, 41, 42, 43, 44, 45, 46, 47, 48, 49, 50, 51, 52, 53, 54, 55, 56, 57, 58, 59, 60, 61, 62, 63, 64, 65, 66, 67, 68, 69, 70, 71, 72, 73, 74, 75, 76, 77, 78, 79, 80, 81, 82, 83, 84, 85, 86, 87, 88, 89, 90 or more amino acid substitutions compared to the native amino acid at the corresponding position of SEQ ID NO: 367, SEQ ID NO: 372, SEQ ID NO: 373, SEQ ID NO: 374, SEQ ID NO: 375 or SEQ ID NO: 376.

[0246] In some embodiments polynucleotides are provided encoding an IPD106-2 polypeptide comprising the amino acid sequence of SEQ ID NO: 367, SEQ ID NO: 372, SEQ ID NO: 373, SEQ ID NO: 374, SEQ ID NO: 375 or SEQ ID NO: 376.

[0247] In some embodiments polynucleotides are provided encoding an IPD106-2 polypeptide comprising the amino acid sequence of SEQ ID NO: 367, SEQ ID NO: 372, SEQ ID NO: 373 or SEQ ID NO: 376.

[0248] In some embodiments polynucleotides are provided, encoding an IPD106-2 polypeptide, comprising the nucleic acid sequence of SEQ ID NO: 618 or SEQ ID NO: 620.

### Polynucleotides Encoding IPD107 Polypeptides

[0249] Sources of polynucleotides encoding IPD107 polypeptide homologs or related proteins include bacterial species selected from but not limited to Pseudomonas species, Chromobacterium species, and Bradyrhizobium species.

[0250] In some embodiments polynucleotides are provided encoding an IPD107 polypeptide comprising an amino acid sequence having at least about 70%, 71%, 72%, 73%, 74%, 75%, 76%, 77%, 78%, 79%, 80%, 81%, 82%, 83%, 84%, 85%, 86%, 87%, 88%, 89%, 90%, 91%, 92%, 93%, 94%, 95%, 96%, 97%, 98%, 99% or greater identity across the entire length of the amino acid sequence of SEQ ID NO: 377, SEQ ID NO: 378, SEQ ID NO: 379, SEQ ID NO: 380, SEQ ID NO: 381, SEQ ID NO: 382, SEQ ID NO: 383, SEQ ID NO: 384, SEQ ID NO: 385, SEQ ID NO: 386, SEQ ID NO: 387, SEQ ID NO: 388, SEQ ID NO: 389, SEQ ID NO: 390, SEQ ID NO: 391, SEQ ID NO: 392, SEQ ID NO: 393, SEQ ID NO: 394, SEQ ID NO: 395, SEQ ID NO: 396, SEQ ID NO: 397, SEQ ID NO: 398, SEQ ID NO: 399, SEQ ID NO: 400, SEQ ID NO: 401, SEQ ID NO: 402, SEQ ID NO: 403, SEQ ID NO: 404, SEQ ID NO: 405, SEQ ID NO: 406, SEQ ID NO: 407, SEQ ID NO: 408, SEQ ID NO: 409, SEQ ID NO: 410, SEQ ID NO: 411, SEQ ID NO: 412, SEQ ID NO: 413, SEQ ID NO: 414, SEQ ID NO: 415, SEQ ID NO: 416, SEQ ID NO: 417, SEQ ID NO: 418, SEQ ID NO: 419, SEQ ID NO: 420, SEQ ID NO: 421, SEQ ID NO: 422, SEQ ID NO: 423, SEQ ID NO: 424, SEQ ID NO: 425, SEQ ID NO: 426, SEQ ID NO: 427, SEQ ID NO: 428, SEQ ID NO: 429, SEQ ID NO: 430, SEQ ID NO: 431, SEQ ID NO: 432, SEQ ID NO: 433, SEQ ID NO: 434, SEQ ID NO: 435, SEQ ID NO: 436, SEQ ID NO: 437, SEQ ID NO: 438, SEQ ID NO: 439, SEQ ID NO: 440, SEQ ID NO: 441, SEQ ID NO: 442, SEQ ID NO: 443, SEQ ID NO: 444, SEQ ID NO: 445, SEQ ID NO: 446, SEQ ID NO: 447, SEQ ID NO: 448, SEQ ID NO: 449, SEQ ID NO: 450, SEQ ID NO: 451 or SEQ ID NO: 452.

[0251] In some embodiments polynucleotides are provided encoding an IPD107 polypeptide comprising an amino acid sequence having at least 95%, 95.5% 96%, 96.5%, 97%, 97%.5%, 98%, 98.1%, 98.2%, 98.3%, 98.4%, 98.5%, 98.6%, 98.7%, 98.8%, 98.9%, 99%, 99.1%, 99.2%, 99.3%, 99.4%, 99.5%, 99.6%, 99.7%, 99.8%, 99.9% or greater identity across the entire length of the amino acid sequence of SEQ ID NO: 377, SEQ ID NO: 378, SEQ ID NO: 381, SEQ ID NO: 382, SEQ ID NO: 384, SEQ ID NO: 386, SEQ ID NO: 387, SEQ ID NO: 388, SEQ ID NO: 389, SEQ ID NO: 390, SEQ ID NO: 391, SEQ ID NO: 393, SEQ ID NO: 396, SEQ ID NO: 397, SEQ ID NO: 398, SEQ ID NO: 400, SEQ ID NO: 401, SEQ ID NO: 402, SEQ ID NO: 403, SEQ ID NO: 404, SEQ ID NO: 405, SEQ ID NO: 407, SEQ ID NO: 409, SEQ ID NO: 410, SEQ ID NO: 411, SEQ ID NO: 412, SEQ ID NO: 413, SEQ ID NO: 414, SEQ ID NO: 415, SEQ ID NO: 417, SEQ ID NO: 418, SEQ ID NO: 419, SEQ ID NO: 420, SEQ ID NO: 421, SEQ ID NO: 422, SEQ ID NO: 426, SEQ ID NO: 427, SEQ ID NO: 428, SEQ ID NO: 429, SEQ ID NO: 430, SEQ ID NO: 431, SEQ ID NO: 432, SEQ ID NO: 433, SEQ ID NO: 434, SEQ ID NO: 435, SEQ ID NO: 438, SEQ ID NO: 439, SEQ ID NO: 440, SEQ ID NO: 442, SEQ ID NO: 443, SEQ ID NO: 445, SEQ ID NO: 446, SEQ ID NO: 451 or SEQ ID NO: 452.

[0252] In some embodiments polynucleotides are provide encoding an IPD107 polypeptide comprising an amino acid sequence of SEQ ID NO: 377, SEQ ID NO: 378, SEQ ID NO: 379, SEQ ID NO: 380, SEQ ID NO: 381, SEQ ID NO: 382, SEQ ID NO: 383, SEQ ID NO: 384, SEQ ID NO: 385, SEQ ID NO: 386, SEQ ID NO: 387, SEQ ID NO: 388, SEQ ID NO: 389, SEQ ID NO: 390, SEQ ID NO: 391, SEQ ID NO: 392, SEQ ID NO: 393, SEQ ID NO: 394, SEQ ID NO: 395, SEQ ID NO: 396, SEQ ID NO: 397, SEQ ID NO: 398, SEQ ID NO: 399, SEQ ID NO: 400, SEQ ID NO: 401, SEQ ID NO: 402, SEQ ID NO: 403, SEQ ID NO: 404, SEQ ID NO: 405, SEQ ID NO: 406, SEQ ID NO: 407, SEQ ID NO: 408, SEQ ID NO: 409, SEQ ID NO: 410, SEQ ID NO: 411, SEQ ID NO: 412, SEQ ID NO: 413, SEQ ID NO: 414, SEQ ID NO: 415, SEQ ID NO: 416, SEQ ID NO: 417, SEQ ID NO: 418, SEQ ID NO: 419, SEQ ID NO: 420, SEQ ID NO: 421, SEQ ID NO: 422, SEQ ID NO: 423, SEQ ID NO: 424, SEQ ID NO: 425, SEQ ID NO: 426, SEQ ID NO: 427, SEQ ID NO: 428, SEQ ID NO: 429, SEQ ID NO: 430, SEQ ID NO: 431, SEQ ID NO: 432, SEQ ID NO: 433, SEQ ID NO: 434, SEQ ID NO: 435, SEQ ID NO: 436, SEQ ID NO: 437, SEQ ID NO: 438, SEQ ID NO: 439, SEQ ID NO: 440, SEQ ID NO: 441, SEQ ID NO: 442, SEQ ID NO: 443, SEQ ID NO: 444, SEQ ID NO: 445, SEQ ID NO: 446, SEQ ID NO: 447, SEQ ID NO: 448, SEQ ID NO: 449, SEQ ID NO: 450, SEQ ID NO: 451 or SEQ ID NO: 452 having 1, 2, 3, 4, 5, 6, 7, 8, 9, 10 11, 12, 13, 14, 15, 16, 17, 18, 19, 20, 21, 22, 23, 24, 25, 26, 27, 28, 29, 30, 31, 32, 33, 34, 35, 36, 37, 38, 39, 40 or more amino acid substitutions compared to the native amino acid at the corresponding position of SEQ ID NO: 377, SEQ ID NO: 378, SEQ ID NO: 379, SEQ ID NO: 380, SEQ ID NO: 381, SEQ ID NO: 382, SEQ ID NO: 383, SEQ ID NO: 384, SEQ ID NO: 385, SEQ ID NO: 386, SEQ ID NO: 387, SEQ ID NO: 388, SEQ ID NO: 389, SEQ ID NO: 390, SEQ ID NO: 391, SEQ ID NO: 392, SEQ ID NO: 393, SEQ ID NO: 394, SEQ ID NO: 395, SEQ ID NO: 396, SEQ ID NO: 397, SEQ ID NO: 398, SEQ ID NO: 399, SEQ ID NO: 400, SEQ ID NO: 401, SEQ ID NO: 402, SEQ ID NO: 403, SEQ ID NO: 404, SEQ ID NO: 405, SEQ ID NO: 406, SEQ ID NO: 407, SEQ ID NO: 408, SEQ ID NO: 409, SEQ ID NO: 410, SEQ ID NO: 411, SEQ ID NO: 412, SEQ ID NO: 413, SEQ ID NO: 414, SEQ ID NO: 415, SEQ ID NO: 416, SEQ ID NO: 417, SEQ ID NO: 418, SEQ ID NO: 419, SEQ ID NO: 420, SEQ ID NO: 421, SEQ ID NO: 422, SEQ ID NO: 423, SEQ ID NO: 424, SEQ ID NO: 425, SEQ ID NO: 426, SEQ ID NO: 427, SEQ ID NO: 428, SEQ ID NO: 429, SEQ ID NO: 430, SEQ ID NO: 431, SEQ ID NO: 432, SEQ ID NO: 433, SEQ ID NO: 434, SEQ ID NO: 435, SEQ ID NO: 436, SEQ ID NO: 437, SEQ ID NO: 438, SEQ ID NO: 439, SEQ ID NO: 440, SEQ ID NO: 441, SEQ ID NO: 442, SEQ ID NO: 443, SEQ ID NO: 444, SEQ ID NO: 445, SEQ ID NO: 446, SEQ ID NO: 447, SEQ ID NO: 448, SEQ ID NO: 449, SEQ ID NO: 450, SEQ ID NO: 451 or SEQ ID NO: 452.

[0253] In some embodiments polynucleotides are provided encoding an IPD107 polypeptide comprising the amino acid sequence of SEQ ID NO: 377, SEQ ID NO: 378, SEQ ID NO: 379, SEQ ID NO: 380, SEQ ID NO: 381, SEQ ID NO: 382, SEQ ID NO: 383, SEQ ID NO: 384, SEQ ID NO: 385, SEQ ID NO: 386, SEQ ID NO: 387, SEQ ID NO: 388, SEQ ID NO: 389, SEQ ID NO: 390, SEQ ID NO: 391, SEQ ID NO: 392, SEQ ID NO: 393, SEQ ID NO: 394, SEQ ID NO: 395, SEQ ID NO: 396, SEQ ID NO: 397, SEQ ID NO: 398, SEQ ID NO: 399, SEQ ID NO: 400, SEQ ID NO: 401, SEQ ID NO: 402, SEQ ID NO: 403, SEQ ID NO: 404, SEQ ID NO: 405, SEQ ID NO: 406, SEQ ID NO: 407, SEQ ID NO: 408, SEQ ID NO: 409, SEQ ID NO: 410, SEQ ID NO: 411, SEQ ID NO: 412, SEQ ID NO: 413, SEQ ID NO: 414, SEQ ID NO: 415, SEQ ID NO: 416, SEQ ID NO: 417, SEQ ID NO: 418, SEQ ID NO: 419, SEQ ID NO: 420, SEQ ID NO: 421, SEQ ID NO: 422, SEQ ID NO: 423, SEQ ID NO: 424, SEQ ID NO: 425, SEQ ID NO: 426, SEQ ID NO: 427, SEQ ID NO: 428, SEQ ID NO: 429, SEQ ID NO: 430, SEQ ID NO: 431, SEQ ID NO: 432, SEQ ID NO: 433, SEQ ID NO: 434, SEQ ID NO: 435, SEQ ID NO: 436, SEQ ID NO: 437, SEQ ID NO: 438, SEQ ID NO: 439, SEQ ID NO: 440, SEQ ID NO: 441, SEQ ID NO: 442, SEQ ID NO: 443, SEQ ID NO: 444, SEQ ID NO: 445, SEQ ID NO: 446, SEQ ID NO: 447, SEQ ID NO: 448, SEQ ID NO: 449, SEQ ID NO: 450, SEQ ID NO: 451 or SEQ ID NO: 452.

[0254] In some embodiments polynucleotides are provided encoding an IPD107 polypeptide comprising the amino acid sequence of SEQ ID NO: 377, SEQ ID NO: 378, SEQ ID NO: 381, SEQ ID NO: 382, SEQ ID NO: 384, SEQ ID NO: 386, SEQ ID NO: 387, SEQ ID NO: 388, SEQ ID NO: 389, SEQ ID NO: 390, SEQ ID NO: 391, SEQ ID NO: 393, SEQ ID NO: 396, SEQ ID NO: 397, SEQ ID NO: 398, SEQ ID NO: 400, SEQ ID NO: 401, SEQ ID NO: 402, SEQ ID NO: 403, SEQ ID NO: 404, SEQ ID NO: 405, SEQ ID NO: 407, SEQ ID NO: 409, SEQ ID NO: 410, SEQ ID NO: 411, SEQ ID NO: 412, SEQ ID NO: 413, SEQ ID NO: 414, SEQ ID NO: 415, SEQ ID NO: 417, SEQ ID NO: 418, SEQ ID NO: 419, SEQ ID NO: 420, SEQ ID NO: 421, SEQ ID NO: 422, SEQ ID NO: 426, SEQ ID NO: 427, SEQ ID NO: 428, SEQ ID NO: 429, SEQ ID NO: 430, SEQ ID NO: 431, SEQ ID NO: 432, SEQ ID NO: 433, SEQ ID NO: 434, SEQ ID NO: 435, SEQ ID NO: 438, SEQ ID NO: 439, SEQ ID NO: 440, SEQ ID NO: 442, SEQ ID NO: 443, SEQ ID NO: 445, SEQ ID NO: 446, SEQ ID NO: 451 or SEQ ID NO: 452.

[0255] In some embodiments polynucleotides are provided, encoding an IPD107 polypeptide, comprising the nucleic acid sequence of SEQ ID NO: 621, SEQ ID NO: 622, SEQ ID NO: 623, SEQ ID NO: 624, SEQ ID NO: 625, SEQ ID NO: 626, SEQ ID NO: 627 or SEQ ID NO: 628

### Polynucleotides Encoding IPD111 Polypeptides

[0256] Sources of polynucleotides encoding IPD111 polypeptide homologs or related proteins include bacterial species selected from but not limited to Pseudomonas species, Chromobacterium species, and Burkholderia species

[0257] In some embodiments polynucleotides are provided encoding an IPD111 polypeptide comprising an amino acid sequence having at least about 70%, 71%, 72%, 73%, 74%, 75%, 76%, 77%, 78%, 79%, 80%, 81%, 82%, 83%, 84%, 85%, 86%, 87%, 88%, 89%, 90%, 91%, 92%, 93%, 94%, 95%, 96%, 97%, 98%, 99% or greater identity across the entire length of the amino acid sequence of SEQ ID NO: 453, SEQ ID NO: 454, SEQ ID NO: 455, SEQ ID NO: 456, SEQ ID NO: 457, SEQ ID NO: 458, SEQ ID NO: 459, SEQ ID NO: 460, SEQ ID NO: 461, SEQ ID NO: 462, SEQ ID NO: 463, SEQ ID NO: 464, SEQ ID NO: 465, SEQ ID NO: 466, SEQ ID NO: 467, SEQ ID NO: 468, SEQ ID NO: 469, SEQ ID NO: 470, SEQ ID NO: 471, SEQ ID NO: 472, SEQ ID NO: 473, SEQ ID NO: 474, SEQ ID NO: 475, SEQ ID NO: 476, SEQ ID NO: 477, SEQ ID NO: 478, SEQ ID NO: 479, SEQ ID NO: 480, SEQ ID NO: 481, SEQ ID NO: 482, SEQ ID NO: 483, SEQ ID NO: 484, SEQ ID NO: 485, SEQ ID NO: 486, SEQ ID NO: 487, SEQ ID NO: 488, SEQ ID NO: 489, SEQ ID NO: 490, SEQ ID NO: 491, SEQ ID NO: 492, SEQ ID NO: 493, SEQ ID NO: 494, SEQ ID NO: 495, SEQ ID NO: 496, SEQ ID NO: 497, SEQ ID NO: 498, SEQ ID NO: 499, SEQ ID NO: 500, SEQ ID NO: 501, SEQ ID NO: 502, SEQ ID NO: 503, SEQ ID NO: 504, SEQ ID NO: 505, SEQ ID NO: 506, SEQ ID NO: 507, SEQ ID NO: 508, SEQ ID NO: 509, SEQ ID NO: 510, SEQ ID NO: 511, SEQ ID NO: 512, SEQ ID NO: 513, SEQ ID NO: 514, SEQ ID NO: 515, SEQ ID NO: 516, SEQ ID NO: 517, SEQ ID NO: 518, SEQ ID NO: 519, SEQ ID NO: 520, SEQ ID NO: 521, SEQ ID NO: 522, SEQ ID NO: 523, SEQ ID NO: 524, SEQ ID NO: 525, SEQ ID NO: 526, SEQ ID NO: 527 or SEQ ID NO: 528.

[0258] In some embodiments polynucleotides are provided encoding an IPD111 polypeptide comprising an amino acid sequence having at least 95%, 95.5% 96%, 96.5%, 97%, 97%.5%, 98%, 98.1%, 98.2%, 98.3%, 98.4%, 98.5%, 98.6%, 98.7%, 98.8%, 98.9%, 99%, 99.1%, 99.2%, 99.3%, 99.4%, 99.5%, 99.6%, 99.7%, 99.8%, 99.9% or greater identity across the entire length of the amino acid sequence of SEQ ID NO: 453, SEQ ID NO: 454, SEQ ID NO: 455, SEQ ID NO: 456, SEQ ID NO: 462, SEQ ID NO: 463, SEQ ID NO: 465, SEQ ID NO: 466, SEQ ID NO: 467, SEQ ID NO: 468, SEQ ID NO: 469, SEQ ID NO: 470, SEQ ID NO: 471, SEQ ID NO: 472, SEQ ID NO: 473, SEQ ID NO: 474, SEQ ID NO: 475, SEQ ID NO: 476, SEQ ID NO: 478, SEQ ID NO: 479, SEQ ID NO: 489, SEQ ID NO: 496, SEQ ID NO: 497, SEQ ID NO: 498, SEQ ID NO: 499, SEQ ID NO: 500, SEQ ID NO: 501, SEQ ID NO: 502, SEQ ID NO: 503, SEQ ID NO: 504, SEQ ID NO: 505, SEQ ID NO: 506, SEQ ID NO: 507, SEQ ID NO: 508, SEQ ID NO: 509, SEQ ID NO: 510, SEQ ID NO: 511, SEQ ID NO: 512, SEQ ID NO: 513, SEQ ID NO: 514, SEQ ID NO: 515, SEQ ID NO: 516, SEQ ID NO: 517, SEQ ID NO: 518, SEQ ID NO: 519, SEQ ID NO: 520, SEQ ID NO: 521, SEQ ID NO: 522, SEQ ID NO: 523, SEQ ID NO: 524 or SEQ ID NO: 526.

[0259] In some embodiments polynucleotides are provided encoding an IPD111 polypeptide comprising an amino acid sequence of SEQ ID NO: 453, SEQ ID NO: 454, SEQ ID NO: 455, SEQ ID NO: 456, SEQ ID NO: 457, SEQ ID NO: 458, SEQ ID NO: 459, SEQ ID NO: 460, SEQ ID NO: 461, SEQ ID NO: 462, SEQ ID NO: 463, SEQ ID NO: 464, SEQ ID NO: 465, SEQ ID NO: 466, SEQ ID NO: 467, SEQ ID NO: 468, SEQ ID NO: 469, SEQ ID NO: 470, SEQ ID NO: 471, SEQ ID NO: 472, SEQ ID NO: 473, SEQ ID NO: 474, SEQ ID NO: 475, SEQ ID NO: 476, SEQ ID NO: 477, SEQ ID NO: 478, SEQ ID NO: 479, SEQ ID NO: 480, SEQ ID NO: 481, SEQ ID NO: 482, SEQ ID NO: 483, SEQ ID NO: 484, SEQ ID NO: 485, SEQ ID NO: 486, SEQ ID NO: 487, SEQ ID NO: 488, SEQ ID NO: 489, SEQ ID NO: 490, SEQ ID NO: 491, SEQ ID NO: 492, SEQ ID NO: 493, SEQ ID NO: 494, SEQ ID NO: 495, SEQ ID NO: 496, SEQ ID NO: 497, SEQ ID NO: 498, SEQ ID NO: 499, SEQ ID NO: 500, SEQ ID NO: 501, SEQ ID NO: 502, SEQ ID NO: 503, SEQ ID NO: 504, SEQ ID NO: 505, SEQ ID NO: 506, SEQ ID NO: 507, SEQ ID NO: 508, SEQ ID NO: 509, SEQ ID NO: 510, SEQ ID NO: 511, SEQ ID NO: 512, SEQ ID NO: 513, SEQ ID NO: 514, SEQ ID NO: 515, SEQ ID NO: 516, SEQ ID NO: 517, SEQ ID NO: 518, SEQ ID NO: 519, SEQ ID NO: 520, SEQ ID NO: 521, SEQ ID NO: 522, SEQ ID NO: 523, SEQ ID NO: 524, SEQ ID NO: 525, SEQ ID NO: 526, SEQ ID NO: 527 or SEQ ID NO: 528 having 1, 2, 3, 4, 5, 6, 7, 8, 9, 10 11, 12, 13, 14, 15, 16, 17, 18, 19, 20, 21, 22, 23, 24, 25, 26, 27, 28, 29, 30, 31, 32, 33, 34, 35, 36, 37, 38, 39, 40, 41, 42, 43, 44, 45, 46, 47, 48, 49, 50, 51, 52, 53, 54, 55, 56, 57, 58, 59, 60, 61, 62, 63, 64, 65, 66, 67, 68, 69, 70, 71, 72, 73, 74, 75, 76, 77, 78, 79, 80, 81, 82, 83, 84, 85, 86, 87, 88, 89, 90 or more amino acid substitutions compared to the native amino acid at the corresponding position of SEQ ID NO: 453, SEQ ID NO: 454, SEQ ID NO: 455, SEQ ID NO: 456, SEQ ID NO: 457, SEQ ID NO: 458, SEQ ID NO: 459, SEQ ID NO: 460, SEQ ID NO: 461, SEQ ID NO: 462, SEQ ID NO: 463, SEQ ID NO: 464, SEQ ID NO: 465, SEQ ID NO: 466, SEQ ID NO: 467, SEQ ID NO: 468, SEQ ID NO: 469, SEQ ID NO: 470, SEQ ID NO: 471, SEQ ID NO: 472, SEQ ID NO: 473, SEQ ID NO: 474, SEQ ID NO: 475, SEQ ID NO: 476, SEQ ID NO: 477, SEQ ID NO: 478, SEQ ID NO: 479, SEQ ID NO: 480, SEQ ID NO: 481, SEQ ID NO: 482, SEQ ID NO: 483, SEQ ID NO: 484, SEQ ID NO: 485, SEQ ID NO: 486, SEQ ID NO: 487, SEQ ID NO: 488, SEQ ID NO: 489, SEQ ID NO: 490, SEQ ID NO: 491, SEQ ID NO: 492, SEQ ID NO: 493, SEQ ID NO: 494, SEQ ID NO: 495, SEQ ID NO: 496, SEQ ID NO: 497, SEQ ID NO: 498, SEQ ID NO: 499, SEQ ID NO: 500, SEQ ID NO: 501, SEQ ID NO: 502, SEQ ID NO: 503, SEQ ID NO: 504, SEQ ID NO: 505, SEQ ID NO: 506, SEQ ID NO: 507, SEQ ID NO: 508, SEQ ID NO: 509, SEQ ID NO: 510, SEQ ID NO: 511, SEQ ID NO: 512, SEQ ID NO: 513, SEQ ID NO: 514, SEQ ID NO: 515, SEQ ID NO: 516, SEQ ID NO: 517, SEQ ID NO: 518, SEQ ID NO: 519, SEQ ID NO: 520, SEQ ID NO: 521, SEQ ID NO: 522, SEQ ID NO: 523, SEQ ID NO: 524, SEQ ID NO: 525, SEQ ID NO: 526, SEQ ID NO: 527 or SEQ ID NO: 528.

[0260] In some embodiments polynucleotides are provided encoding an IPD111 polypeptide comprising the amino acid sequence of SEQ ID NO: 453, SEQ ID NO: 454, SEQ ID NO: 455, SEQ ID NO: 456, SEQ ID NO: 457, SEQ ID NO: 458, SEQ ID NO: 459, SEQ ID NO: 460, SEQ ID NO: 461, SEQ ID NO: 462, SEQ ID NO: 463, SEQ ID NO: 464, SEQ ID NO: 465, SEQ ID NO: 466, SEQ ID NO: 467, SEQ ID NO: 468, SEQ ID NO: 469, SEQ ID NO: 470, SEQ ID NO: 471, SEQ ID NO: 472, SEQ ID NO: 473, SEQ ID NO: 474, SEQ ID NO: 475, SEQ ID NO: 476, SEQ ID NO: 477, SEQ ID NO: 478, SEQ ID NO: 479, SEQ ID NO: 480, SEQ ID NO: 481, SEQ ID NO: 482, SEQ ID NO: 483, SEQ ID NO: 484, SEQ ID NO: 485, SEQ ID NO: 486, SEQ ID NO: 487, SEQ ID NO: 488, SEQ ID NO: 489, SEQ ID NO: 490, SEQ ID NO: 491, SEQ ID NO: 492, SEQ ID NO: 493, SEQ ID NO: 494, SEQ ID NO: 495, SEQ ID NO: 496, SEQ ID NO: 497, SEQ ID NO: 498, SEQ ID NO: 499, SEQ ID NO: 500, SEQ ID NO: 501, SEQ ID NO: 502, SEQ ID NO: 503, SEQ ID NO: 504, SEQ ID NO: 505, SEQ ID NO: 506, SEQ ID NO: 507, SEQ ID NO: 508, SEQ ID NO: 509, SEQ ID NO: 510, SEQ ID NO: 511, SEQ ID NO: 512, SEQ ID NO: 513, SEQ ID NO: 514, SEQ ID NO: 515, SEQ ID NO: 516, SEQ ID NO: 517, SEQ ID NO: 518, SEQ ID NO: 519, SEQ ID NO: 520, SEQ ID NO: 521, SEQ ID NO: 522, SEQ ID NO: 523, SEQ ID NO: 524, SEQ ID NO: 525, SEQ ID NO: 526, SEQ ID NO: 527 or SEQ ID NO: 528.

[0261] In some embodiments polynucleotides are provided encoding an IPD111 polypeptide comprising the amino acid sequence of SEQ ID NO: 453, SEQ ID NO: 454, SEQ ID NO: 455, SEQ ID NO: 456, SEQ ID NO: 462, SEQ ID NO: 463, SEQ ID NO: 465, SEQ ID NO: 466, SEQ ID NO: 467, SEQ ID NO: 468, SEQ ID NO: 469, SEQ ID NO: 470, SEQ ID NO: 471, SEQ ID NO: 472, SEQ ID NO: 473, SEQ ID NO: 474, SEQ ID NO: 475, SEQ ID NO: 476, SEQ ID NO: 478, SEQ ID NO: 479, SEQ ID NO: 489, SEQ ID NO: 496, SEQ ID NO: 497, SEQ ID NO: 498, SEQ ID NO: 499, SEQ ID NO: 500, SEQ ID NO: 501, SEQ ID NO: 502, SEQ ID NO: 503, SEQ ID NO: 504, SEQ ID NO: 505, SEQ ID NO: 506, SEQ ID NO: 507, SEQ ID NO: 508, SEQ ID NO: 509, SEQ ID NO: 510, SEQ ID NO: 511, SEQ ID NO: 512, SEQ ID NO: 513, SEQ ID NO: 514, SEQ ID NO: 515, SEQ ID NO: 516, SEQ ID NO: 517, SEQ ID NO: 518, SEQ ID NO: 519, SEQ ID NO: 520, SEQ ID NO: 521, SEQ ID NO: 522, SEQ ID NO: 523, SEQ ID NO: 524 or SEQ ID NO: 526.

[0262] In some embodiments polynucleotides are provided, encoding an IPD111 polypeptide, comprising the nucleic acid sequence of SEQ ID NO: 629, SEQ ID NO: 630, SEQ ID NO: 631, SEQ ID NO: 632, SEQ ID NO: 633 or SEQ ID NO: 634.

### Polynucleotides Encoding IPD112 Polypeptides

[0263] Sources of IPD112 polypeptide homologs or related proteins include bacterial species selected from but not limited to Pseudomonas species and Hafnia species.

[0264] In some embodiments polynucleotides are provided encoding an IPD112 polypeptide comprising an amino acid sequence having at least about 70%, 71%, 72%, 73%, 74%, 75%, 76%, 77%, 78%, 79%, 80%, 81%, 82%, 83%, 84%, 85%, 86%, 87%, 88%, 89%, 90%, 91%, 92%, 93%, 94%, 95%, 96%, 97%, 98%, 99% or greater identity across the entire length of the amino acid sequence of SEQ ID NO: 529, SEQ ID NO: 530, SEQ ID NO: 531, SEQ ID NO: 532, SEQ ID NO: 533, SEQ ID NO: 534, SEQ ID NO: 535, SEQ ID NO: 536, SEQ ID NO: 537, SEQ ID NO: 538, SEQ ID NO: 539, SEQ ID NO: 540, SEQ ID NO: 541, SEQ ID NO: 542, SEQ ID NO: 543, SEQ ID NO: 544 or SEQ ID NO: 545.

[0265] In some embodiments polynucleotides are provided encoding an IPD112 polypeptide comprising an amino acid sequence having at least 95%, 95.5% 96%, 96.5%, 97%, 97%.5%, 98%, 98.1%, 98.2%, 98.3%, 98.4%, 98.5%, 98.6%, 98.7%, 98.8%, 98.9%, 99%, 99.1%, 99.2%, 99.3%, 99.4%, 99.5%, 99.6%, 99.7%, 99.8%, 99.9% or greater identity across the entire length of the amino acid sequence of SEQ ID NO: 529, SEQ ID NO: 530, SEQ ID NO: 531, SEQ ID NO: 532, SEQ ID NO: 534, SEQ ID NO: 537 or SEQ ID NO: 545.

[0266] In some embodiments polynucleotides are provided encoding an IPD112 polypeptide comprising an amino acid sequence of SEQ ID NO: 529, SEQ ID NO: 530, SEQ ID NO: 531, SEQ ID NO: 532, SEQ ID NO: 533, SEQ ID NO: 534, SEQ ID NO: 535, SEQ ID NO: 536, SEQ ID NO: 537, SEQ ID NO: 538, SEQ ID NO: 539, SEQ ID NO: 540, SEQ ID NO: 541, SEQ ID NO: 542, SEQ ID NO: 543, SEQ ID NO: 544 or SEQ ID NO: 545 having 1, 2, 3, 4, 5, 6, 7, 8, 9, 10 11, 12, 13, 14, 15, 16, 17, 18, 19, 20, 21, 22, 23, 24, 25, 26, 27, 28, 29, 30, 31, 32, 33, 34, 35, 36, 37, 38, 39, 40, 41, 42, 43, 44, 45, 46, 47, 48, 49, 50, 51, 52, 53, 54, 55, 56, 57, 58, 59, 60, 61, 62, 63, 64, 65, 66, 67, 68, 69, 70, 71, 72, 73, 74, 75, 76, 77, 78, 79, 80, 81, 82, 83, 84, 85, 86, 87, 88, 89, 90 or more amino acid substitutions compared to the native amino acid at the corresponding position of SEQ ID NO: 529, SEQ ID NO: 530, SEQ ID NO: 531, SEQ ID NO: 532, SEQ ID NO: 533, SEQ ID NO: 534, SEQ ID NO: 535, SEQ ID NO: 536, SEQ ID NO: 537, SEQ ID NO: 538, SEQ ID NO: 539, SEQ ID NO: 540, SEQ ID NO: 541, SEQ ID NO: 542, SEQ ID NO: 543, SEQ ID NO: 544 or SEQ ID NO: 545.

[0267] In some embodiments polynucleotides are provided encoding an IPD112 polypeptide comprising the amino acid sequence of SEQ ID NO: 529, SEQ ID NO: 530, SEQ ID NO: 531, SEQ ID NO: 532, SEQ ID NO: 533, SEQ ID NO: 534, SEQ ID NO: 535, SEQ ID NO: 536, SEQ ID NO: 537, SEQ ID NO: 538, SEQ ID NO: 539, SEQ ID NO: 540, SEQ ID NO: 541, SEQ ID NO: 542, SEQ ID NO: 543, SEQ ID NO: 544 or SEQ ID NO: 545.

[0268] In some embodiments polynucleotides are provided encoding an IPD112 polypeptide comprising the amino acid sequence of SEQ ID NO: 529, SEQ ID NO: 530, SEQ ID NO: 531, SEQ ID NO: 532, SEQ ID NO: 534, SEQ ID NO: 537 or SEQ ID NO: 545.

[0269] In some embodiments polynucleotides are provided, encoding an IPD112 polypeptide, comprising the nucleic acid sequence of SEQ ID NO: 635, SEQ ID NO: 636, SEQ ID NO: 637 or SEQ ID NO: 638.

[0270] The polynucleotides of the disclosure can be used to express the disclosed polypeptides in recombinant bacterial hosts that include but are not limited to Agrobacterium, Bacillus, Escherichia, Salmonella, Pseudomonas and Rhizobium bacterial host cells. The polynucleotides are also useful as probes for isolating homologous or substantially homologous polynucleotides encoding the disclosed insecticidal polypeptides or related proteins. Such probes can be used to identify homologous or substantially homologous polynucleotides derived from Pseudomonas species.

[0271] Polynucleotides encoding the disclosed polypeptides can also be synthesized de novo from a disclosed polypeptide sequence. The sequence of the polynucleotide gene can be deduced from a disclosed polypeptide sequence through use of the genetic code. Computer programs such as “BackTranslate” (GCG™ Package, Acclerys, Inc. San Diego, Calif.) can be used to convert a peptide sequence to the corresponding nucleotide sequence encoding the peptide. Furthermore, synthetic polynucleotide sequences of the disclosure can be designed so that they will be expressed in plants.

[0272] In some embodiments, the nucleic acid molecule encoding a polypeptide of the disclosure is a non-genomic nucleic acid sequence. As used herein a “non-genomic nucleic acid sequence” or “non-genomic nucleic acid molecule” or “non-genomic polynucleotide” refers to a nucleic acid molecule that has one or more change in the nucleic acid sequence compared to a native or genomic nucleic acid sequence. In some embodiments, the change to a native or genomic nucleic acid molecule includes but is not limited to: changes in the nucleic acid sequence due to the degeneracy of the genetic code; optimization of the nucleic acid sequence for expression in plants; changes in the nucleic acid sequence to introduce at least one amino acid substitution, insertion, deletion and/or addition compared to the native or genomic sequence; removal of one or more intron associated with the genomic nucleic acid sequence; insertion of one or more heterologous introns; deletion of one or more upstream or downstream regulatory regions associated with the genomic nucleic acid sequence; insertion of one or more heterologous upstream or downstream regulatory regions; deletion of the 5′ and/or 3′ untranslated region associated with the genomic nucleic acid sequence; insertion of a heterologous 5′ and/or 3′ untranslated region; and modification of a polyadenylation site. In some embodiments, the non-genomic nucleic acid molecule is a synthetic nucleic acid sequence.

[0273] Also provided are nucleic acid molecules encoding transcription and/or translation products that are subsequently spliced to ultimately produce functional Polypeptides of the disclosure. Splicing can be accomplished in vitro or in vivo, and can involve cis- or trans-splicing. The substrate for splicing can be polynucleotides (e.g., RNA transcripts) or polypeptides. An example of cis-splicing of a polynucleotide is where an intron inserted into a coding sequence is removed and the two flanking exon regions are spliced to generate a polypeptide of the disclosure encoding sequence. An example of trans-splicing would be where a polynucleotide is encrypted by separating the coding sequence into two or more fragments that can be separately transcribed and then spliced to form the full-length pesticidal encoding sequence. The use of a splicing enhancer sequence, which can be introduced into a construct, can facilitate splicing either in cis or trans-splicing of polypeptides (U.S. Pat. Nos. 6,365,377 and 6,531,316). Thus, in some embodiments polynucleotides do not directly encode a full-length polypeptide of the disclosure, but rather encode a fragment or fragments of a polypeptide of the disclosure. These polynucleotides can be used to express a functional polypeptide of the disclosure through a mechanism involving splicing, where splicing can occur at the level of polynucleotide (e.g., intron/exon) and/or polypeptide (e.g., intein/extein). This can be useful, for example, in controlling expression of pesticidal activity, since a functional pesticidal polypeptide will only be expressed if all required fragments are expressed in an environment that permits splicing processes to generate functional product. In another example, introduction of one or more insertion sequences into a polynucleotide can facilitate recombination with a low homology polynucleotide; use of an intron or intein for the insertion sequence facilitates the removal of the intervening sequence, thereby restoring function of the encoded variant.

[0274] Nucleic acid molecules that are fragments of these nucleic acid sequences encoding Polypeptides of the disclosure are also encompassed by the embodiments. “Fragment” as used herein refers to a portion of the nucleic acid sequence encoding a polypeptide of the disclosure. A fragment of a nucleic acid sequence may encode a biologically active portion of a polypeptide of the disclosure or it may be a fragment that can be used as a hybridization probe or PCR primer using methods disclosed below. Nucleic acid molecules that are fragments of a nucleic acid sequence encoding a polypeptide of the disclosure comprise at least about 150, 180, 210, 240, 270, 300, 330 or 360, contiguous nucleotides or up to the number of nucleotides present in a full-length nucleic acid sequence encoding a polypeptide of the disclosure disclosed herein, depending upon the intended use. “Contiguous nucleotides” is used herein to refer to nucleotide residues that are immediately adjacent to one another. Fragments of the nucleic acid sequences of the embodiments will encode protein fragments that retain the biological activity of the polypeptide of the disclosure and, hence, retain insecticidal activity. “Retains insecticidal activity” is used herein to refer to a polypeptide having at least about 10%, at least about 30%, at least about 50%, at least about 70%, 80%, 90%, 95% or higher of the insecticidal activity of a full-length polypeptide of the disclosure. In some embodiments, the insecticidal activity is against a Lepidopteran species. In one embodiment, the insecticidal activity is against a Coleopteran species. In some embodiments, the insecticidal activity is against one or more insect pests of the corn rootworm complex: western corn rootworm, Diabrotica virgifera; northern corn rootworm, D. barberi: Southern corn rootworm or spotted cucumber beetle; Diabrotica undecimpunctata howardi, and the Mexican corn rootworm, D. virgifera zeae. In one embodiment, the insecticidal activity is against a Diabrotica species.

[0275] To determine the percent identity of two amino acid sequences or of two nucleic acid sequences, the sequences are aligned for optimal comparison purposes. The percent identity between the two sequences is a function of the number of identical positions shared by the sequences (i.e., percent identity=number of identical positions/total number of positions (e.g., overlapping positions)×100). In one embodiment, the two sequences are the same length. In another embodiment, the comparison is across the entirety of the reference sequence (e.g., across the entirety of SEQ ID NO: 1). The percent identity between two sequences can be determined using techniques similar to those described below, with or without allowing gaps. In calculating percent identity, typically exact matches are counted.

[0276] Another non-limiting example of a mathematical algorithm utilized for the comparison of sequences is the algorithm of Needleman and Wunsch, (1970) J. Mol. Biol. 48(3):443-453, used GAP Version 10 software to determine sequence identity or similarity using the following default parameters: % identity and % similarity for a nucleic acid sequence using GAP Weight of 50 and Length Weight of 3, and the nwsgapdna.cmpii scoring matrix; % identity or % similarity for an amino acid sequence using GAP weight of 8 and length weight of 2, and the BLOSUM62 scoring program. Equivalent programs may also be used. “Equivalent program” is used herein to refer to any sequence comparison program that, for any two sequences in question, generates an alignment having identical nucleotide residue matches and an identical percent sequence identity when compared to the corresponding alignment generated by GAP Version 10.

[0277] In some embodiments polynucleotides are provided encoding chimeric polypeptides comprising regions of at least two different polypeptides of the disclosure.

[0278] The embodiments also encompass nucleic acid molecules encoding variants of the polypeptides of the disclosure. “Variants” of the polypeptide of the disclosure encoding nucleic acid sequences include those sequences encoding the polypeptides of the disclosure but that differ conservatively because of the degeneracy of the genetic code as well as those that are sufficiently identical as discussed above. Naturally occurring allelic variants can be identified using techniques, such as polymerase chain reaction (PCR) and hybridization techniques as outlined below. Variant nucleic acid sequences also include synthetically derived nucleic acid sequences that have been generated, for example, by using site-directed mutagenesis but which still encode the polypeptides of the disclosure as discussed below.

[0279] The present disclosure provides isolated or recombinant polynucleotides encoding any of the polypeptides of the disclosure. Those having ordinary skill in the art will readily appreciate that due to the degeneracy of the genetic code, a multitude of nucleotide sequences encoding polypeptides of the disclosure exist.

[0280] Changes can be introduced by mutation of the nucleic acid sequences thereby leading to changes in the amino acid sequence of the encoded polypeptides of the disclosure, without altering the biological activity of the proteins. Thus, variant nucleic acid molecules can be created by introducing one or more nucleotide substitutions, additions and/or deletions into the corresponding nucleic acid sequence disclosed herein, such that one or more amino acid substitutions, additions or deletions are introduced into the encoded protein. Mutations can be introduced by standard techniques, such as site-directed mutagenesis and PCR-mediated mutagenesis. Such variant nucleic acid sequences are also encompassed by the present disclosure.

[0281] Alternatively, variant nucleic acid sequences can be made by introducing mutations randomly along all or part of the coding sequence, such as by saturation mutagenesis, and the resultant mutants can be screened for ability to confer pesticidal activity to identify mutants that retain activity. Following mutagenesis, the encoded protein can be expressed recombinantly, and the activity of the protein can be determined using standard assay techniques.

[0282] The polynucleotides of the disclosure and fragments thereof are optionally used as substrates for a variety of recombination and recursive recombination reactions, in addition to standard cloning methods as set forth in, e.g., Ausubel, Berger and Sambrook, i.e., to produce additional pesticidal polypeptide homologues and fragments thereof with desired properties. Methods for producing a variant of any nucleic acid listed herein comprising recursively recombining such polynucleotide with a second (or more) polynucleotide, thus forming a library of variant polynucleotides are also embodiments of the disclosure, as are the libraries produced, the cells comprising the libraries and any recombinant polynucleotide produced by such methods. Additionally, such methods optionally comprise selecting a variant polynucleotide from such libraries based on pesticidal activity, as is wherein such recursive recombination is done in vitro or in vivo.

[0283] A variety of diversity generating protocols, including nucleic acid recursive recombination protocols are available and fully described in the art. The procedures can be used separately, and/or in combination to produce one or more variants of a nucleic acid or set of nucleic acids, as well as variants of encoded proteins. Individually and collectively, these procedures provide robust, widely applicable ways of generating diversified nucleic acids and sets of nucleic acids (including, e.g., nucleic acid libraries) useful, e.g., for the engineering or rapid evolution of nucleic acids, proteins, pathways, cells and/or organisms with new and/or improved characteristics.

[0284] While distinctions and classifications are made in the course of the ensuing discussion for clarity, it will be appreciated that the techniques are often not mutually exclusive. Indeed, the various methods can be used singly or in combination, in parallel or in series, to access diverse sequence variants.

[0285] The result of any of the diversity generating procedures described herein can be the generation of one or more nucleic acids, which can be selected or screened for nucleic acids with or which confer desirable properties or encoding proteins with or which confer desirable properties. Following diversification by one or more of the methods herein or otherwise available to one of skill, any nucleic acids that are produced can be selected for a desired activity or property, e.g. pesticidal activity or, such activity at a desired pH, etc. This can include identifying any activity that can be detected, for example, in an automated or automatable format, by any of the assays in the art, see, e.g., discussion of screening of insecticidal activity, infra. A variety of related (or even unrelated) properties can be evaluated, in serial or in parallel, at the discretion of the practitioner.

[0286] The nucleotide sequences of the embodiments can also be used to isolate corresponding sequences from a bacterial source, including but not limited to a Pseudomonas species. In this manner, methods such as PCR, hybridization, and the like can be used to identify such sequences based on their sequence homology to the sequences set forth herein. Sequences that are selected based on their sequence identity to the entire sequences set forth herein or to fragments thereof are encompassed by the embodiments. Such sequences include sequences that are orthologs of the disclosed sequences. The term “orthologs” refers to genes derived from a common ancestral gene and which are found in different species as a result of speciation. Genes found in different species are considered orthologs when their nucleotide sequences and/or their encoded protein sequences share substantial identity as defined elsewhere herein. Functions of orthologs are often highly conserved among species.

[0287] In a PCR approach, oligonucleotide primers can be designed for use in PCR reactions to amplify corresponding DNA sequences from cDNA or genomic DNA extracted from any organism of interest. Methods for designing PCR primers and PCR cloning can be found in Sambrook, et al., (1989) Molecular Cloning: A Laboratory Manual (2d ed., Cold Spring Harbor Laboratory Press, Plainview, New York), hereinafter “Sambrook”. See also, Innis, et al., eds. (1990) PCR Protocols: A Guide to Methods and Applications (Academic Press, New York); Innis and Gelfand, eds. (1995) PCR Strategies (Academic Press, New York); and Innis and Gelfand, eds. (1999) PCR Methods Manual (Academic Press, New York). Methods of PCR include, but are not limited to, methods using paired primers, nested primers, single specific primers, degenerate primers, gene-specific primers, vector-specific primers, partially-mismatched primers, and the like.

[0288] To identify potential polypeptides of the disclosure from bacterium collections, the bacterial cell lysates can be screened with antibodies generated against a polypeptide of the disclosure using Western blotting and/or ELISA methods. This type of assays can be performed in a high throughput fashion. Positive samples can be further analyzed by various techniques such as antibody based protein purification and identification.

[0289] Alternatively, mass spectrometry based protein identification method can be used to identify homologs of polypeptides of the disclosure using protocols in the literatures (Scott Patterson, (1998), 10.22, 1-24, Current Protocol in Molecular Biology published by John Wiley & Son Inc). Specifically, LC-MS/MS based protein identification method is used to associate the MS data of given cell lysate or desired molecular weight enriched samples (excised from SDS-PAGE gel of relevant molecular weight bands to polypeptides of the disclosure) with sequence information of polypeptides of the disclosure. Any match in peptide sequences indicates the potential of having the homologous proteins in the samples. Additional techniques (protein purification and molecular biology) can be used to isolate the protein and identify the sequences of the homologs.

[0290] In hybridization methods, all or part of the pesticidal nucleic acid sequence can be used to screen cDNA or genomic libraries. Methods for construction of such cDNA and genomic libraries can be found in Sambrook and Russell, (2001), supra. The so-called hybridization probes may be genomic DNA fragments, cDNA fragments, RNA fragments or other oligonucleotides and may be labeled with a detectable group such as 32P or any other detectable marker, such as other radioisotopes, a fluorescent compound, an enzyme or an enzyme co-factor. Probes for hybridization can be made by labeling synthetic oligonucleotides based on the known polypeptide of the disclosure-encoding nucleic acid sequence disclosed herein. Degenerate primers designed based on conserved nucleotides or amino acid residues in the nucleic acid sequence or encoded amino acid sequence can additionally be used. The probe typically comprises a region of nucleic acid sequence that hybridizes under stringent conditions to at least about 12, at least about 25, at least about 50, 75, 100, 125, 150, 175 or 200 consecutive nucleotides of nucleic acid sequence encoding a polypeptide of the disclosure or a fragment or variant thereof. Methods for the preparation of probes for hybridization can be found in Sambrook and Russell, (2001), supra, herein incorporated by reference.

[0291] Hybridization may be carried out under stringent conditions. “Stringent conditions” or “stringent hybridization conditions” is used herein to refer to conditions under which a probe will hybridize to its target sequence to a detectably greater degree than to other sequences (e.g., at least 2-fold over background). Stringent conditions are sequence-dependent and will be different in different circumstances. By controlling the stringency of the hybridization and/or washing conditions, target sequences that are 100% complementary to the probe can be identified (homologous probing). Alternatively, stringency conditions can be adjusted to allow some mismatching in sequences so that lower degrees of similarity are detected (heterologous probing). Generally, a probe is less than about 1000 nucleotides in length, preferably less than 500 nucleotides in length

### Compositions

[0292] Compositions comprising at least one polypeptide of the disclosure are also embraced. In one embodiment, the composition comprises a polypeptide of the disclosure and an agriculturally accepted carrier.

[0293] One embodiment of the disclosure relates to a composition comprising a polypeptide of the disclosure and an entomopathogenic fungal strain selected from Metarhizium robertsii and Metarhizium anisopliae. In certain embodiments, the fungal entomopathogen comprises a spore, a microsclerotia or conidia. In some embodiments, a fungal entomopathogen has insecticidal activity.

[0294] In one embodiment, the disclosure relates to a composition for increasing resistance to a plant pest, pathogen or insect or for increasing plant health and/or yield comprising a polypeptide of the disclosure and one or more entomopathogenic fungal strains selected from the group consisting of Metarhizium anisopliae 15013-1 (NRRL 67073), Metarhizium robertsii 23013-3 (NRRL 67075), Metarhizium anisopliae 3213-1 (NRRL 67074) or any combinations thereof. In another embodiment, the disclosure relates to a composition comprising a polypeptide of the disclosure, an agriculturally accepted carrier, and a fungal entomopathogen selected from the group consisting of Metarhizium anisopliae 15013-1, Metarhizium robertsii 23013-3, Metarhizium anisopliae 3213-1 or any combinations thereof. In a further embodiment, the fungal entomopathogen comprises a spore, conidia or microsclerotia. In another embodiment, the disclosure relates to a composition comprising a polypeptide of the disclosure and one or more entomopathogenic fungal strains selected from the group consisting of Metarhizium anisopliae 15013-1 (NRRL 67073), Metarhizium robertsii 23013-3 (NRRL 67075), Metarhizium anisopliae 3213-1 (NRRL 67074), mutants of these strains, a metabolite or combination of metabolites produced by a strain disclosed herein that exhibits insecticidal activity towards a plant pest, pathogen or insect or any combinations thereof.

### Antibodies

[0295] Antibodies to a polypeptide of the disclosure or to variants or fragments thereof are also encompassed. The antibodies of the disclosure include polyclonal and monoclonal antibodies as well as fragments thereof which retain their ability to bind to a polypeptide of the disclosure found in the insect gut.

[0296] A kit for detecting the presence of a polypeptide of the disclosure or detecting the presence of a nucleotide sequence encoding a polypeptide of the disclosure in a sample is provided. In one embodiment, the kit provides antibody-based reagents for detecting the presence of a polypeptide of the disclosure in a tissue sample. In another embodiment, the kit provides labeled nucleic acid probes useful for detecting the presence of one or more polynucleotides encoding a polypeptide of the disclosure. The kit is provided along with appropriate reagents and controls for carrying out a detection method, as well as instructions for use of the kit.

### Receptor Identification and Isolation

[0297] Receptors to the polypeptide of the disclosure or to variants or fragments thereof are also encompassed. Methods for identifying receptors can be found in Hofmann, et. al., (1988) Eur. J. Biochem. 173:85-91; Gill, et al., (1995) J. Biol. Chem. 27277-27282), which can be employed to identify and isolate the receptor that recognizes the polypeptide of the disclosure using the brush-border membrane vesicles from susceptible insects. In addition to the radioactive labeling method listed in the cited literatures, a polypeptide of the disclosure can be labeled with fluorescent dye and other common labels such as streptavidin. Brush-border membrane vesicles (BBMV) of susceptible insects such as soybean looper and stink bugs can be prepared according to the protocols listed in the references and separated on SDS-PAGE gel and blotted on suitable membrane. Labeled polypeptide of the disclosure can be incubated with blotted membrane of BBMV and labeled polypeptide of the disclosure can be identified with the labeled reporters.

[0298] Identification of protein band(s) that interact with can be detected by N-terminal amino acid gas phase sequencing or mass spectrometry based protein identification method (Patterson, (1998) 10.22, 1-24, Current Protocol in Molecular Biology published by John Wiley & Son Inc). Once the protein is identified, the corresponding gene can be cloned from genomic DNA or cDNA library of the susceptible insects and binding affinity can be measured directly with the polypeptide of the disclosure. Receptor function for insecticidal activity by the polypeptide of the disclosure can be verified by accomplished by RNAi type of gene knock out method (Rajagopal, et al., (2002) J. Biol. Chem. 277:46849-46851).

### Nucleotide Constructs, Expression Cassettes and Vectors

[0299] The use of the term “nucleotide constructs” herein is not intended to limit the embodiments to nucleotide constructs comprising DNA. Those of ordinary skill in the art will recognize that nucleotide constructs particularly polynucleotides and oligonucleotides composed of ribonucleotides and combinations of ribonucleotides and deoxyribonucleotides may also be employed in the methods disclosed herein. The nucleotide constructs, nucleic acids, and nucleotide sequences of the embodiments additionally encompass all complementary forms of such constructs, molecules, and sequences. Further, the nucleotide constructs, nucleotide molecules, and nucleotide sequences of the embodiments encompass all nucleotide constructs, molecules, and sequences which can be employed in the methods of the embodiments for transforming plants including, but not limited to, those comprised of deoxyribonucleotides, ribonucleotides, and combinations thereof. Such deoxyribonucleotides and ribonucleotides include both naturally occurring molecules and synthetic analogues. The nucleotide constructs, nucleic acids, and nucleotide sequences of the embodiments also encompass all forms of nucleotide constructs including, but not limited to, single-stranded forms, double-stranded forms, hairpins, stem-and-loop structures and the like.

[0300] A further embodiment relates to a transformed organism such as an organism selected from plant and insect cells, bacteria, yeast, baculovirus, protozoa, nematodes and algae. The transformed organism comprises a DNA molecule of the embodiments, an expression cassette comprising the DNA molecule or a vector comprising the expression cassette, which may be stably incorporated into the genome of the transformed organism.

[0301] The sequences of the embodiments are provided in DNA constructs for expression in the organism of interest. The construct will include 5′ and 3′ regulatory sequences operably linked to a sequence of the embodiments. The term “operably linked” as used herein refers to a functional linkage between a promoter and a second sequence, wherein the promoter sequence initiates and mediates transcription of the DNA sequence corresponding to the second sequence. Generally, operably linked means that the nucleic acid sequences being linked are contiguous and where necessary to join two protein coding regions in the same reading frame. The construct may additionally contain at least one additional gene to be cotransformed into the organism. Alternatively, the additional gene(s) can be provided on multiple DNA constructs.

[0302] Such a DNA construct is provided with a plurality of restriction sites for insertion of the polypeptide of the disclosure gene sequence of the disclosure to be under the transcriptional regulation of the regulatory regions. The DNA construct may additionally contain selectable marker genes.

[0303] The DNA construct will generally include in the 5′ to 3′ direction of transcription: a transcriptional and translational initiation region (i.e., a promoter), a DNA sequence of the embodiments, and a transcriptional and translational termination region (i.e., termination region) functional in the organism serving as a host. The transcriptional initiation region (i.e., the promoter) may be native, analogous, foreign or heterologous to the host organism and/or to the sequence of the embodiments. Additionally, the promoter may be the natural sequence or alternatively a synthetic sequence. The term “foreign” as used herein indicates that the promoter is not found in the native organism into which the promoter is introduced. Where the promoter is “foreign” or “heterologous” to the sequence of the embodiments, it is intended that the promoter is not the native or naturally occurring promoter for the operably linked sequence of the embodiments. As used herein, a chimeric gene comprises a coding sequence operably linked to a transcription initiation region that is heterologous to the coding sequence. Where the promoter is a native or natural sequence, the expression of the operably linked sequence is altered from the wild-type expression, which results in an alteration in phenotype.

[0304] In some embodiments, the DNA construct comprises a polynucleotide encoding a polypeptide of the disclosure.

[0305] In some embodiments, the DNA construct comprises a polynucleotide encoding a chimeric polypeptide of the disclosure.

[0306] In some embodiments, the DNA construct comprises a polynucleotide encoding a fusion protein comprising a polypeptide of the disclosure.

[0307] In some embodiments, the DNA construct may also include a transcriptional enhancer sequence. As used herein, the term an “enhancer” refers to a DNA sequence which can stimulate promoter activity, and may be an innate element of the promoter or a heterologous element inserted to enhance the level or tissue-specificity of a promoter. Various enhancers including for example, introns with gene expression enhancing properties in plants (US Patent Application Publication Number 2009/0144863, the ubiquitin intron (i.e., the maize ubiquitin intron 1 (see, for example, NCBI sequence S94464)), the omega enhancer or the omega prime enhancer (Gallie, et al., (1989) Molecular Biology of RNA ed. Cech (Liss, New York) 237-256 and Gallie, et al., (1987) Gene 60:217-25), the CaMV 35S enhancer (see, e.g., Benfey, et al., (1990) EMBO J. 9:1685-96) and the enhancers of U.S. Pat. No. 7,803,992 may also be used, each of which is incorporated by reference. U.S. Pat. No. 8,785,612 discloses the sugarcane bacilliform badnavirus (SCBV) transcriptional enhancer. The above list of transcriptional enhancers is not meant to be limiting. Any appropriate transcriptional enhancer can be used in the embodiments.

[0308] The termination region may be native with the transcriptional initiation region, may be native with the operably linked DNA sequence of interest, may be native with the plant host or may be derived from another source (i.e., foreign or heterologous to the promoter, the sequence of interest, the plant host or any combination thereof).

[0309] Convenient termination regions are available from the Ti-plasmid of A. tumefaciens, such as the octopine synthase and nopaline synthase termination regions. See also, Guerineau, et al., (1991) Mol. Gen. Genet. 262:141-144; Proudfoot, (1991) Cell 64:671-674; Sanfacon, et al., (1991) Genes Dev. 5:141-149; Mogen, et al., (1990) Plant Cell 2:1261-1272; Munroe, et al., (1990) Gene 91:151-158; Ballas, et al., (1989) Nucleic Acids Res. 17:7891-7903 and Joshi, et al., (1987) Nucleic Acid Res. 15:9627-9639. Other useful transcription terminators for expression of transgenes in plants include the transcription terminators MYB2, KTI1, PIP1, EF1A2, and MTH1 of U.S. Pat. No. 8,741,634.

[0310] Where appropriate, a nucleic acid may be optimized for increased expression in the host organism. Thus, where the host organism is a plant, the synthetic nucleic acids can be synthesized using plant-preferred codons for improved expression. See, for example, Campbell and Gowri, (1990) Plant Physiol. 92:1-11 for a discussion of host-preferred usage. For example, although nucleic acid sequences of the embodiments may be expressed in both monocotyledonous and dicotyledonous plant species, sequences can be modified to account for the specific preferences and GC content preferences of monocotyledons or dicotyledons as these preferences have been shown to differ (Murray et al. (1989) Nucleic Acids Res. 17:477-498). Thus, the maize-preferred codon for an amino acid may be derived from known gene sequences from maize. Maize usage for 28 genes from maize plants is listed in Table 4 of Murray, et al., supra. Methods are available in the art for synthesizing plant-preferred genes. See, for example, Murray, et al., (1989) Nucleic Acids Res. 17:477-498, and Liu H et al. Mol Bio Rep 37:677-684, 2010, herein incorporated by reference. A Zea maize usage table can be also found at kazusa.or.jp//cgi-bin/show.cgi?species=4577, which can be accessed using the www prefix.

[0311] A Glycine max usage table can be found at kazusa.or.jp//cgi-bin/show.cgi?species=3847&aa=1&style=N, which can be accessed using the www prefix.

[0312] In some embodiments, the recombinant nucleic acid molecule encoding a polypeptide of the disclosure has maize optimized codons.

[0313] Additional sequence modifications are known to enhance gene expression in a cellular host. These include elimination of sequences encoding spurious polyadenylation signals, exon-intron splice site signals, transposon-like repeats, and other well-characterized sequences that may be deleterious to gene expression. The GC content of the sequence may be adjusted to levels average for a given cellular host, as calculated by reference to known genes expressed in the host cell. The term “host cell” as used herein refers to a cell which contains a vector and supports the replication and/or expression of the expression vector is intended. Host cells may be prokaryotic cells such as E. coli or eukaryotic cells such as yeast, insect, amphibian or mammalian cells or monocotyledonous or dicotyledonous plant cells. An example of a monocotyledonous host cell is a maize host cell. When possible, the sequence is modified to avoid predicted hairpin secondary mRNA structures.

[0314] The expression cassettes may additionally contain 5′ leader sequences. Such leader sequences can act to enhance translation. Translation leaders include: picornavirus leaders, for example, EMCV leader (Encephalomyocarditis 5′ noncoding region) (Elroy-Stein, et al., (1989) Proc. Natl. Acad. Sci. USA 86:6126-6130); potyvirus leaders, for example, TEV leader (Tobacco Etch Virus) (Gallie, et al., (1995) Gene 165(2):233-238), MDMV leader (Maize Dwarf Mosaic Virus), human immunoglobulin heavy-chain binding protein (BiP) (Macejak, et al., (1991) Nature 353:90-94); untranslated leader from the coat protein mRNA of alfalfa mosaic virus (AMV RNA 4) (Jobling, et al., (1987) Nature 325:622-625); tobacco mosaic virus leader (TMV) (Gallie, et al., (1989) in Molecular Biology of RNA, ed. Cech (Liss, New York), pp. 237-256) and maize chlorotic mottle virus leader (MCMV) (Lommel, et al., (1991) Virology 81:382-385). See also, Della-Cioppa, et al., (1987) Plant Physiol. 84:965-968. Such constructs may also contain a “signal sequence” or “leader sequence” to facilitate co-translational or post-translational transport of the peptide to certain intracellular structures such as the chloroplast (or other plastid), endoplasmic reticulum or Golgi apparatus.

[0315] “Signal sequence” as used herein refers to a sequence that is known or suspected to result in cotranslational or post-translational peptide transport across the cell membrane. In eukaryotes, this typically involves secretion into the Golgi apparatus, with some resulting glycosylation. Insecticidal toxins of bacteria are often synthesized as protoxins, which are proteolytically activated in the gut of the target pest (Chang, (1987) Methods Enzymol. 153:507-516). In some embodiments, the signal sequence is located in the native sequence or may be derived from a sequence of the embodiments. “Leader sequence” as used herein refers to any sequence that when translated, results in an amino acid sequence sufficient to trigger co-translational transport of the peptide chain to a subcellular organelle. Thus, this includes leader sequences targeting transport and/or glycosylation by passage into the endoplasmic reticulum, passage to vacuoles, plastids including chloroplasts, mitochondria, and the like. Nuclear-encoded proteins targeted to the chloroplast thylakoid lumen compartment have a characteristic bipartite transit peptide, composed of a stromal targeting signal peptide and a lumen targeting signal peptide. The stromal targeting information is in the amino-proximal portion of the transit peptide. The lumen targeting signal peptide is in the carboxyl-proximal portion of the transit peptide, and contains all the information for targeting to the lumen. Recent research in proteomics of the higher plant chloroplast has achieved in the identification of numerous nuclear-encoded lumen proteins (Kieselbach et al. FEBS LETT 480:271-276, 2000; Peltier et al. Plant Cell 12:319-341, 2000; Bricker et al. Biochim. Biophys Acta 1503:350-356, 2001), the lumen targeting signal peptide of which can potentially be used in accordance with the present disclosure. About 80 proteins from Arabidopsis, as well as homologous proteins from spinach and garden pea, are reported by Kieselbach et al., Photosynthesis Research, 78:249-264, 2003. In particular, Table 2 of this publication, which is incorporated into the description herewith by reference, discloses 85 proteins from the chloroplast lumen, identified by their accession number (see also US Patent Application Publication 2009/09044298). In addition, the recently published draft version of the rice genome (Goff et al, Science 296:92-100, 2002) is a suitable source for lumen targeting signal peptide which may be used in accordance with the present disclosure.

[0316] Suitable chloroplast transit peptides (CTP) include chimeric CT's comprising but not limited to: an N-terminal domain, a central domain or a C-terminal domain from a CTP from Oryza sativa 1-decoy-D xylose-5-Phosphate Synthase Oryza sativa-Superoxide dismutase Oryza sativa-soluble starch synthase Oryza sativa-NADP-dependent Malic acid enzyme Oryza sativa-Phospho-2-dehydro-3-deoxyheptonate Aldolase 2 Oryza sativa-L-Ascorbate peroxidase 5 Oryza sativa-Phosphoglucan water dikinase, Zea mays ssRUBISCO, Zea mays-beta-glucosidase, Zea mays-Malate dehydrogenase, Zea mays Thioredoxin M-type (U.S. Pat. No. 9,150,625); a chloroplast transit peptide of US Patent Application Publication Number US20130210114.

[0317] The gene encoding a polypeptide of the disclosure to be targeted to the chloroplast may be optimized for expression in the chloroplast to account for differences in usage between the plant nucleus and this organelle. In this manner, the nucleic acids of interest may be synthesized using chloroplast-preferred sequences.

[0318] In preparing the expression cassette, the various DNA fragments may be manipulated to provide for the DNA sequences in the proper orientation and, as appropriate, in the proper reading frame. Toward this end, adapters or linkers may be employed to join the DNA fragments or other manipulations may be involved to provide for convenient restriction sites, removal of superfluous DNA, removal of restriction sites or the like. For this purpose, in vitro mutagenesis, primer repair, restriction, annealing, resubstitutions, e.g., transitions and transversions, may be involved.

[0319] A number of promoters can be used in the practice of the embodiments. The promoters can be selected based on the desired outcome. The nucleic acids can be combined with constitutive, tissue-preferred, inducible or other promoters for expression in the host organism. Suitable constitutive promoters for use in a plant host cell include, for example, the core promoter of the Rsyn7 promoter and other constitutive promoters disclosed in WO 1999/43838 and U.S. Pat. No. 6,072,050; the core CaMV 35S promoter (Odell, et al., (1985) Nature 313:810-812); rice actin (McElroy, et al., (1990) Plant Cell 2:163-171); ubiquitin (Christensen, et al., (1989) Plant Mol. Biol. 12:619-632 and Christensen, et al., (1992) Plant Mol. Biol. 18:675-689); pEMU (Last, et al., (1991) Theor. Appl. Genet. 81:581-588); MAS (Velten, et al., (1984) EMBO J. 3:2723-2730), U.S. Pat. Nos. 8,168,859, 8,420,797; Ubiquitin transcriptional regulatory elements and transcriptional regulatory expression element group are disclosed in U.S. Pat. No. 9,062,316; ALS promoter (U.S. Pat. No. 5,659,026) and the like. The Soybean ADF1 constitutive promoter is disclosed in US Patent Application Publication US20150184174. The Soybean CCP1 constitutive promoter is disclosed in US Patent Application Publication US20150167011. Other constitutive promoters include, for example, those discussed in U.S. Pat. Nos. 5,608,149; 5,608,144; 5,604,121; 5,569,597; 5,466,785; 5,399,680; 5,268,463; 5,608,142 and 6,177,611. Transcriptional initiation regions isolated from a blueberry red ringspot virus (BRRV) are disclosed in U.S. Pat. No. 8,895,716. Transcriptional initiation regions isolated from a cacao swollen shoot virus (CSSV) are disclosed in U.S. Pat. No. 8,962,916.

[0320] Depending on the desired outcome, it may be beneficial to express the gene from an inducible promoter. Of particular interest for regulating the expression of the nucleotide sequences of the embodiments in plants are wound-inducible promoters. Such wound-inducible promoters, may respond to damage caused by insect feeding, and include potato proteinase inhibitor (pin II) gene (Ryan, (1990) Ann. Rev. Phytopath. 28:425-449; Duan, et al., (1996) Nature Biotechnology 14:494-498); wun1 and wun2, U.S. Pat. No. 5,428,148; win1 and win2 (Stanford, et al., (1989) Mol. Gen. Genet. 215:200-208); systemin (McGurl, et al., (1992) Science 225:1570-1573); WIP1 (Rohmeier, et al., (1993) Plant Mol. Biol. 22:783-792; Eckelkamp, et al., (1993) FEBS Letters 323:73-76); MPI gene (Corderok, et al., (1994) Plant J. 6(2):141-150) and the like, herein incorporated by reference.

[0321] Additionally, pathogen-inducible promoters may be employed in the methods and nucleotide constructs of the embodiments. Such pathogen-inducible promoters include those from pathogenesis-related proteins (PR proteins), which are induced following infection by a pathogen; e.g., PR proteins, SAR proteins, beta-1,3-glucanase, chitinase, etc. See, for example, Redolfi, et al., (1983) Neth. J. Plant Pathol. 89:245-254; Uknes, et al., (1992) Plant Cell 4: 645-656 and Van Loon, (1985) Plant Mol. Virol. 4:111-116. See also, WO 1999/43819, herein incorporated by reference.

[0322] Of interest are promoters that are expressed locally at or near the site of pathogen infection. See, for example, Marineau, et al., (1987) Plant Mol. Biol. 9:335-342; Matton, et al., (1989) Molecular Plant-Microbe Interactions 2:325-331; Somsisch, et al., (1986) Proc. Natl. Acad. Sci. USA 83:2427-2430; Somsisch, et al., (1988) Mol. Gen. Genet. 2:93-98 and Yang, (1996) Proc. Natl. Acad. Sci. USA 93:14972-14977. See also, Chen, et al., (1996) Plant J. 10:955-966; Zhang, et al., (1994) Proc. Natl. Acad. Sci. USA 91:2507-2511; Warner, et al., (1993) Plant J. 3:191-201; Siebertz, et al., (1989) Plant Cell 1:961-968; U.S. Pat. No. 5,750,386 (nematode-inducible) and the references cited therein. Of particular interest is the inducible promoter for the maize PRms gene, whose expression is induced by the pathogen Fusarium moniliforme (see, for example, Cordero, et al., (1992) Physiol. Mol. Plant Path. 41:189-200).

[0323] Chemical-regulated promoters can be used to modulate the expression of a gene in a plant through the application of an exogenous chemical regulator. Depending upon the objective, the promoter may be a chemical-inducible promoter, where application of the chemical induces gene expression or a chemical-repressible promoter, where application of the chemical represses gene expression. Chemical-inducible promoters include the maize In2-2 promoter, which is activated by benzenesulfonamide herbicide safeners, the maize GST promoter, which is activated by hydrophobic electrophilic compounds that are used as pre-emergent herbicides, and the tobacco PR-1a promoter, which is activated by salicylic acid. Other chemical-regulated promoters of interest include steroid-responsive promoters (see, for example, the glucocorticoid-inducible promoter in Schena, et al., (1991) Proc. Natl. Acad. Sci. USA 88:10421-10425 and McNellis, et al., (1998) Plant J. 14(2):247-257) and tetracycline-inducible and tetracycline-repressible promoters (see, for example, Gatz, et al., (1991) Mol. Gen. Genet. 227:229-237 and U.S. Pat. Nos. 5,814,618 and 5,789,156), herein incorporated by reference.

[0324] Tissue-preferred promoters can be utilized to target enhanced a polypeptide of the disclosure expression within a particular plant tissue. Tissue-preferred promoters include those discussed in Yamamoto, et al., (1997) Plant J. 12(2)255-265; Kawamata, et al., (1997) Plant Cell Physiol. 38(7):792-803; Hansen, et al., (1997) Mol. Gen Genet. 254(3):337-343; Russell, et al., (1997) Transgenic Res. 6(2):157-168; Rinehart, et al., (1996) Plant Physiol. 112(3):1331-1341; Van Camp, et al., (1996) Plant Physiol. 112(2):525-535; Canevascini, et al., (1996) Plant Physiol. 112(2):513-524; Yamamoto, et al., (1994) Plant Cell Physiol. 35(5):773-778; Lam, (1994) Results Probl. Cell Differ. 20:181-196; Orozco, et al., (1993) Plant Mol Biol. 23(6):1129-1138; Matsuoka, et al., (1993) Proc Natl. Acad. Sci. USA 90(20):9586-9590 and Guevara-Garcia, et al., (1993) Plant J. 4(3):495-505. Additional tissue specific promoters include the promoters of U.S. Pat. Nos. 8,816,152 and 9,150,624. Such promoters can be modified, if necessary, for weak expression.

[0325] Leaf-preferred promoters can be found in Yamamoto, et al., (1997) Plant J. 12(2):255-265; Kwon, et al., (1994) Plant Physiol. 105:357-67; Yamamoto, et al., (1994) Plant Cell Physiol. 35(5):773-778; Gotor, et al., (1993) Plant J. 3:509-18; Orozco, et al., (1993) Plant Mol. Biol. 23(6):1129-1138 and Matsuoka, et al., (1993) Proc. Natl. Acad. Sci. USA 90(20):9586-9590.

[0326] US Patent Application-preferred or root-specific promoters can be found in Hire, et al., (1992) Plant Mol. Biol. 20(2):207-218 (soybean root-specific glutamine synthetase gene); Keller and Baumgartner, (1991) Plant Cell 3(10):1051-1061 (root-specific control element in the GRP 1.8 gene of French bean); Sanger, et al., (1990) Plant Mol. Biol. 14(3):433-443 (root-specific promoter of the mannopine synthase (MAS) gene of Agrobacterium tumefaciens) and Miao, et al., (1991) Plant Cell 3(1):11-22 (full-length cDNA clone encoding cytosolic glutamine synthetase (GS), which is expressed in roots and root nodules of soybean). See also, Bogusz, et al., (1990) Plant Cell 2(7):633-641, where two root-specific promoters isolated from hemoglobin genes from the nitrogen-fixing nonlegume Parasponia andersonii and the related non-nitrogen-fixing nonlegume Trema tomentosa are described. The promoters of these genes were linked to a β-glucuronidase reporter gene and introduced into both the nonlegume Nicotiana tabacum and the legume Lotus corniculatus, and in both instances root-specific promoter activity was preserved. Leach and Aoyagi, (1991) describe their analysis of the promoters of the highly expressed roIC and roID root-inducing genes of Agrobacterium rhizogenes (see, Plant Science (Limerick) 79(1):69-76). They concluded that enhancer and tissue-preferred DNA determinants are dissociated in those promoters. Teeri, et al., (1989) used gene fusion to lacZ to show that the Agrobacterium T-DNA gene encoding octopine synthase is especially active in the epidermis of the root tip and that the TR2′ gene is root specific in the intact plant and stimulated by wounding in leaf tissue, an especially desirable combination of characteristics for use with an insecticidal or larvicidal gene (see, EMBO J. 8(2):343-350). The TR1′ gene fused to nptII (neomycin phosphotransferase II) showed similar characteristics. Additional root-preferred promoters include the VfENOD-GRP3 gene promoter (Kuster, et al., (1995) Plant Mol. Biol. 29(4):759-772) and roIB promoter (Capana, et al., (1994) Plant Mol. Biol. 25(4):681-691. See also, U.S. Pat. Nos. 5,837,876; 5,750,386; 5,633,363; 5,459,252; 5,401,836; 5,110,732 and 5,023,179. Arabidopsis thaliana root-preferred regulatory sequences are disclosed in US20130117883. US Patent Application Publication Number US20160097054 discloses the sorghum root-preferred promoter PLTP. US Patent Application Publication Number US20160145634 discloses the sorghum root-preferred promoter TIP2-3. U.S. Pat. No. 8,916,377 discloses the sorghum root-preferred promoter RCc3.

[0327] “Seed-preferred” promoters include both “seed-specific” promoters (those promoters active during seed development such as promoters of seed storage proteins) as well as “seed-germinating” promoters (those promoters active during seed germination). See, Thompson, et al., (1989) BioEssays 10:108, herein incorporated by reference. Such seed-preferred promoters include, but are not limited to, Cim1 (cytokinin-induced message); cZ19B1 (maize 19 kDa zein); and milps (myo-inositol-1-phosphate synthase) (see, U.S. Pat. No. 6,225,529, herein incorporated by reference). Gamma-zein and Glb-1 are endosperm-specific promoters. For dicots, seed-specific promoters include, but are not limited to, Kunitz trypsin inhibitor 3 (KTi3) (Jofuku and Goldberg, (1989) Plant Cell 1:1079-1093), bean β-phaseolin, napin, β-conglycinin, glycinin 1, soybean lectin, cruciferin, and the like. For monocots, seed-specific promoters include, but are not limited to, maize 15 kDa zein, 22 kDa zein, 27 kDa zein, g-zein, waxy, shrunken 1, shrunken 2, globulin 1, etc. See also, WO 2000/12733, where seed-preferred promoters from end1 and end2 genes are disclosed; herein incorporated by reference. In dicots, seed specific promoters include but are not limited to seed coat promoter from Arabidopsis, pBAN; and the early seed promoters from Arabidopsis, p26, p63, and p63tr (U.S. Pat. Nos. 7,294,760 and 7,847,153). A promoter that has “preferred” expression in a particular tissue is expressed in that tissue to a greater degree than in at least one other plant tissue. Some tissue-preferred promoters show expression almost exclusively in the particular tissue.

[0328] Where low level expression is desired, weak promoters will be used. Generally, the term “weak promoter” as used herein refers to a promoter that drives expression of a coding sequence at a low level. By low level expression at levels of between about 1/1000 transcripts to about 1/100,000 transcripts to about 1/500,000 transcripts is intended. Alternatively, it is recognized that the term “weak promoters” also encompasses promoters that drive expression in only a few cells and not in others to give a total low level of expression. Where a promoter drives expression at unacceptably high levels, portions of the promoter sequence can be deleted or modified to decrease expression levels.

[0329] Such weak constitutive promoters include, for example the core promoter of the Rsyn7 promoter (WO 1999/43838 and U.S. Pat. No. 6,072,050), the core 35S CaMV promoter, and the like. Other constitutive promoters include, for example, those disclosed in U.S. Pat. Nos. 5,608,149; 5,608,144; 5,604,121; 5,569,597; 5,466,785; 5,399,680; 5,268,463; 5,608,142, 6,177,611, and 8,697,857, herein incorporated by reference.

[0330] Chimeric or hybrid promoters include those disclosed in U.S. Pat. Nos. 8,846,892, 8,822,666, and 9,181,560.

[0331] The above list of promoters is not meant to be limiting. Any appropriate promoter can be used in the embodiments.

[0332] Generally, the expression cassette will comprise a selectable marker gene for the selection of transformed cells. Selectable marker genes are utilized for the selection of transformed cells or tissues. Marker genes include genes encoding antibiotic resistance, such as those encoding neomycin phosphotransferase II (NEO) and hygromycin phosphotransferase (HPT), as well as genes conferring resistance to herbicidal compounds, such as glufosinate ammonium, bromoxynil, imidazolinones and 2,4-dichlorophenoxyacetate (2,4-D). Additional examples of suitable selectable marker genes include, but are not limited to, genes encoding resistance to chloramphenicol (Herrera Estrella, et al., (1983) EMBO J. 2:987-992); methotrexate (Herrera Estrella, et al., (1983) Nature 303:209-213 and Meijer, et al., (1991) Plant Mol. Biol. 16:807-820); streptomycin (Jones, et al., (1987) Mol. Gen. Genet. 210:86-91); spectinomycin (Bretagne-Sagnard, et al., (1996) Transgenic Res. 5:131-137); bleomycin (Hille, et al., (1990) Plant Mol. Biol. 7:171-176); sulfonamide (Guerineau, et al., (1990) Plant Mol. Biol. 15:127-136); bromoxynil (Stalker, et al., (1988) Science 242:419-423); glyphosate (Shaw, et al., (1986) Science 233:478-481 and U.S. patent application Ser. Nos. 10/004,357 and 10/427,692); phosphinothricin (DeBlock, et al., (1987) EMBO J. 6:2513-2518). See generally, Yarranton, (1992) Curr. Opin. Biotech. 3:506-511; Christopherson, et al., (1992) Proc. Natl. Acad. Sci. USA 89:6314-6318; Yao, et al., (1992) Cell 71:63-72; Reznikoff, (1992) Mol. Microbiol. 6:2419-2422; Barkley, et al., (1980) in The Operon, pp. 177-220; Hu, et al., (1987) Cell 48:555-566; Brown, et al., (1987) Cell 49:603-612; Figge, et al., (1988) Cell 52:713-722; Deuschle, et al., (1989) Proc. Natl. Acad. Sci. USA 86:5400-5404; Fuerst, et al., (1989) Proc. Natl. Acad. Sci. USA 86:2549-2553; Deuschle, et al., (1990) Science 248:480-483; Gossen, (1993) Ph.D. Thesis, University of Heidelberg; Reines, et al., (1993) Proc. Natl. Acad. Sci. USA 90:1917-1921; Labow, et al., (1990) Mol. Cell. Biol. 10:3343-3356; Zambretti, et al., (1992) Proc. Natl. Acad. Sci. USA 89:3952-3956; Baim, et al., (1991) Proc. Natl. Acad. Sci. USA 88:5072-5076; Wyborski, et al., (1991) Nucleic Acids Res. 19:4647-4653; Hillenand-Wissman, (1989) Topics Mol. Struc. Biol. 10:143-162; Degenkolb, et al., (1991) Antimicrob. Agents Chemother. 35:1591-1595; Kleinschnidt, et al., (1988) Biochemistry 27:1094-1104; Bonin, (1993) Ph.D. Thesis, University of Heidelberg; Gossen, et al., (1992) Proc. Natl. Acad. Sci. USA 89:5547-5551; Oliva, et al., (1992) Antimicrob. Agents Chemother. 36:913-919; Hlavka, et al., (1985) Handbook of Experimental Pharmacology, Vol. 78 (Springer-Verlag, Berlin) and Gill, et al., (1988) Nature 334:721-724. Such disclosures are herein incorporated by reference.

[0333] The above list of selectable marker genes is not meant to be limiting. Any selectable marker gene can be used in the embodiments.

### Plant Transformation

[0334] The methods of the embodiments involve introducing a polypeptide or polynucleotide into a plant. “Introducing” is as used herein means presenting to the plant the polynucleotide or polypeptide in such a manner that the sequence gains access to the interior of a cell of the plant. The methods of the embodiments do not depend on a particular method for introducing a polynucleotide or polypeptide into a plant, only that the polynucleotide or polypeptides gains access to the interior of at least one cell of the plant. Methods for introducing polynucleotide or polypeptides into plants include stable transformation methods, transient transformation methods, and virus-mediated methods.

[0335] “Stable transformation” is as used herein means that the nucleotide construct introduced into a plant integrates into the genome of the plant and is capable of being inherited by the progeny thereof. “Transient transformation” as used herein means that a polynucleotide is introduced into the plant and does not integrate into the genome of the plant or a polypeptide is introduced into a plant. “Plant” as used herein refers to whole plants, plant organs (e.g., leaves, stems, roots, etc.), seeds, plant cells, propagules, embryos and progeny of the same. Plant cells can be differentiated or undifferentiated (e.g. callus, suspension culture cells, protoplasts, leaf cells, root cells, phloem cells and pollen).

[0336] Transformation protocols as well as protocols for introducing nucleotide sequences into plants may vary depending on the type of plant or plant cell, i.e., monocot or dicot, targeted for transformation. Suitable methods of introducing nucleotide sequences into plant cells and subsequent insertion into the plant genome include microinjection (Crossway, et al., (1986) Biotechniques 4:320-334), electroporation (Riggs, et al., (1986) Proc. Natl. Acad. Sci. USA 83:5602-5606), Agrobacterium-mediated transformation (U.S. Pat. Nos. 5,563,055 and 5,981,840), direct gene transfer (Paszkowski, et al., (1984) EMBO J. 3:2717-2722) and ballistic particle acceleration (see, for example, U.S. Pat. Nos. 4,945,050; 5,879,918; 5,886,244 and 5,932,782; Tomes, et al., (1995) in Plant Cell, Tissue, and Organ Culture: Fundamental Methods, ed. Gamborg and Phillips, (Springer-Verlag, Berlin) and McCabe, et al., (1988) Biotechnology 6:923-926) and Lecl transformation (WO 00/28058). For potato transformation see, Tu, et al., (1998) Plant Molecular Biology 37:829-838 and Chong, et al., (2000) Transgenic Research 9:71-78. Additional transformation procedures can be found in Weissinger, et al., (1988) Ann. Rev. Genet. 22:421-477; Sanford, et al., (1987) Particulate Science and Technology 5:27-37 (onion); Christou, et al., (1988) Plant Physiol. 87:671-674 (soybean); McCabe, et al., (1988) Bio/Technology 6:923-926 (soybean); Finer and McMullen, (1991) In Vitro Cell Dev. Biol. 27P:175-182 (soybean); Singh, et al., (1998) Theor. Appl. Genet. 96:319-324 (soybean); Datta, et al., (1990) Biotechnology 8:736-740 (rice); Klein, et al., (1988) Proc. Natl. Acad. Sci. USA 85:4305-4309 (maize); Klein, et al., (1988) Biotechnology 6:559-563 (maize); U.S. Pat. Nos. 5,240,855; 5,322,783 and 5,324,646; Klein, et al., (1988) Plant Physiol. 91:440-444 (maize); Fromm, et al., (1990) Biotechnology 8:833-839 (maize); Hooykaas-Van Slogteren, et al., (1984) Nature (London) 311:763-764; U.S. Pat. No. 5,736,369 (cereals); Bytebier, et al., (1987) Proc. Natl. Acad. Sci. USA 84:5345-5349 (Liliaceae); De Wet, et al., (1985) in The Experimental Manipulation of Ovule Tissues, ed. Chapman, et al., (Longman, New York), pp. 197-209 (pollen); Kaeppler, et al., (1990) Plant Cell Reports 9:415-418 and Kaeppler, et al., (1992) Theor. Appl. Genet. 84:560-566 (whisker-mediated transformation); D'Halluin, et al., (1992) Plant Cell 4:1495-1505 (electroporation); Li, et al., (1993) Plant Cell Reports 12:250-255 and Christou and Ford, (1995) Annals of Botany 75:407-413 (rice); Osjoda, et al., (1996) Nature Biotechnology 14:745-750 (maize via Agrobacterium tumefaciens); all of which are herein incorporated by reference.

[0337] In specific embodiments, the sequences of the embodiments can be provided to a plant using a variety of transient transformation methods. Such transient transformation methods include, but are not limited to, the introduction of the polynucleotide or variants and fragments thereof directly into the plant or the introduction of the polypeptide of the disclosure transcript into the plant. Such methods include, for example, microinjection or particle bombardment. See, for example, Crossway, et al., (1986) Mol Gen. Genet. 202:179-185; Nomura, et al., (1986) Plant Sci. 44:53-58; Hepler, et al., (1994) Proc. Natl. Acad. Sci. 91:2176-2180 and Hush, et al., (1994) The Journal of Cell Science 107:775-784, all of which are herein incorporated by reference. Alternatively, the polynucleotide can be transiently transformed into the plant using techniques such as a viral vector system and the precipitation of the polynucleotide in a manner that precludes subsequent release of the DNA. Thus, transcription from the particle-bound DNA can occur, but the frequency with which it is released to become integrated into the genome is greatly reduced. Such methods include the use of particles coated with polyethylimine (PEI; Sigma #P3143).

[0338] Methods for the targeted insertion of a polynucleotide at a specific location in the plant genome include the insertion of the polynucleotide at a desired genomic location is achieved using a site-specific recombination system. See, for example, WO 1999/25821, WO 1999/25854, WO 1999/25840, WO 1999/25855 and WO 1999/25853, all of which are herein incorporated by reference. Briefly, the polynucleotide of the embodiments can be contained in transfer cassette flanked by two non-identical recombination sites. The transfer cassette is introduced into a plant have stably incorporated into its genome a target site which is flanked by two non-identical recombination sites that correspond to the sites of the transfer cassette. An appropriate recombinase is provided and the transfer cassette is integrated at the target site. The polynucleotide of interest is thereby integrated at a specific chromosomal position in the plant genome.

[0339] Plant transformation vectors may be comprised of one or more DNA vectors needed for achieving plant transformation. For example, it is a common practice in the art to utilize plant transformation vectors that are comprised of more than one contiguous DNA segment. These vectors are often referred to in the art as “binary vectors”. Binary vectors as well as vectors with helper plasmids are most often used for Agrobacterium-mediated transformation, where the size and complexity of DNA segments needed to achieve efficient transformation is quite large, and it is advantageous to separate functions onto separate DNA molecules. Binary vectors typically contain a plasmid vector that contains the cis-acting sequences required for T-DNA transfer (such as left border and right border), a selectable marker that is engineered to be capable of expression in a plant cell, and a “gene of interest” (a gene engineered to be capable of expression in a plant cell for which generation of transgenic plants is desired). Also, present on this plasmid vector are sequences required for bacterial replication. The cis-acting sequences are arranged in a fashion to allow efficient transfer into plant cells and expression therein. For example, the selectable marker gene and the pesticidal gene are located between the left and right borders. Often a second plasmid vector contains the trans-acting factors that mediate T-DNA transfer from Agrobacterium to plant cells. This plasmid often contains the virulence functions (Vir genes) that allow infection of plant cells by Agrobacterium, and transfer of DNA by cleavage at border sequences and vir-mediated DNA transfer, as is understood in the art (Hellens and Mullineaux, (2000) Trends in Plant Science 5:446-451). Several types of Agrobacterium strains (e.g. LBA4404, GV3101, EHA101, EHA105, etc.) can be used for plant transformation. The second plasmid vector is not necessary for transforming the plants by other methods such as microprojection, microinjection, electroporation, polyethylene glycol, etc.

[0340] In general, plant transformation methods involve transferring heterologous DNA into target plant cells (e.g., immature or mature embryos, suspension cultures, undifferentiated callus, protoplasts, etc.), followed by applying a maximum threshold level of appropriate selection (depending on the selectable marker gene) to recover the transformed plant cells from a group of untransformed cell mass. Following integration of heterologous foreign DNA into plant cells, one then applies a maximum threshold level of appropriate selection in the medium to kill the untransformed cells and separate and proliferate the putatively transformed cells that survive from this selection treatment by transferring regularly to a fresh medium. By continuous passage and challenge with appropriate selection, one identifies and proliferates the cells that are transformed with the plasmid vector. Molecular and biochemical methods can then be used to confirm the presence of the integrated heterologous gene of interest into the genome of the transgenic plant.

[0341] Explants are typically transferred to a fresh supply of the same medium and cultured routinely. Subsequently, the transformed cells are differentiated into shoots after placing on regeneration medium supplemented with a maximum threshold level of selecting agent. The shoots are then transferred to a selective rooting medium for recovering rooted shoot or plantlet. The transgenic plantlet then grows into a mature plant and produces fertile seeds (e.g., Hiei, et al., (1994) The Plant Journal 6:271-282; Ishida, et al., (1996) Nature Biotechnology 14:745-750). Explants are typically transferred to a fresh supply of the same medium and cultured routinely. A general description of the techniques and methods for generating transgenic plants are found in Ayres and Park, (1994) Critical Reviews in Plant Science 13:219-239 and Bommineni and Jauhar, (1997) Maydica 42:107-120. Since the transformed material contains many cells; both transformed and non-transformed cells are present in any piece of subjected target callus or tissue or group of cells. The ability to kill non-transformed cells and allow transformed cells to proliferate results in transformed plant cultures. Often, the ability to remove non-transformed cells is a limitation to rapid recovery of transformed plant cells and successful generation of transgenic plants.

[0342] The cells that have been transformed may be grown into plants in accordance with conventional ways. See, for example, McCormick, et al., (1986) Plant Cell Reports 5:81-84. These plants may then be grown, and either pollinated with the same transformed strain or different strains, and the resulting hybrid having constitutive or inducible expression of the desired phenotypic characteristic identified. Two or more generations may be grown to ensure that expression of the desired phenotypic characteristic is stably maintained and inherited and then seeds harvested to ensure that expression of the desired phenotypic characteristic has been achieved.

[0343] The nucleotide sequences of the embodiments may be provided to the plant by contacting the plant with a virus or viral nucleic acids. Generally, such methods involve incorporating the nucleotide construct of interest within a viral DNA or RNA molecule. It is recognized that the recombinant proteins of the embodiments may be initially synthesized as part of a viral polyprotein, which later may be processed by proteolysis in vivo or in vitro to produce the desired polypeptide of the disclosure. It is also recognized that such a viral polyprotein, comprising at least a portion of the amino acid sequence of a polypeptide of the embodiments, may have the desired pesticidal activity. Such viral polyproteins and the nucleotide sequences encoding for them are encompassed by the embodiments. Methods for providing plants with nucleotide constructs and producing the encoded proteins in the plants, which involve viral DNA or RNA molecules, for example, U.S. Pat. Nos. 5,889,191; 5,889,190; 5,866,785; 5,589,367 and 5,316,931; herein incorporated by reference.

[0344] Methods for transformation of chloroplasts can be used, for example, Svab, et al., (1990) Proc. Natl. Acad. Sci. USA 87:8526-8530; Svab and Maliga, (1993) Proc. Natl. Acad. Sci. USA 90:913-917; Svab and Maliga, (1993) EMBO J. 12:601-606. The method relies on particle gun delivery of DNA containing a selectable marker and targeting of the DNA to the plastid genome through homologous recombination. Additionally, plastid transformation can be accomplished by transactivation of a silent plastid-borne transgene by tissue-preferred expression of a nuclear-encoded and plastid-directed RNA polymerase. Such a system has been reported in McBride, et al., (1994) Proc. Natl. Acad. Sci. USA 91:7301-7305.

[0345] The embodiments further relate to plant-propagating material of a transformed plant of the embodiments including, but not limited to, seeds, tubers, corms, bulbs, leaves and cuttings of roots and shoots.

[0346] The embodiments may be used for transformation of any plant species, including, but not limited to, monocots and dicots. Examples of plants of interest include, but are not limited to, corn (Zea mays), Brassica sp. (e.g., B. napus, B. rapa, B. juncea), particularly those Brassica species useful as sources of seed oil, alfalfa (Medicago sativa), rice (Oryza sativa), rye (Secale cereale), sorghum (Sorghum bicolor, Sorghum vulgare), millet (e.g., pearl millet (Pennisetum glaucum), proso millet (Panicum miliaceum), foxtail millet (Setaria italica), finger millet (Eleusine coracana)), sunflower (Helianthus annuus), safflower (Carthamus tinctorius), wheat (Triticum aestivum), soybean (Glycine max), tobacco (Nicotiana tabacum), potato (Solanum tuberosum), peanuts (Arachis hypogaea), cotton (Gossypium barbadense, Gossypium hirsutum), sweet potato (Ipomoea batatus), cassava (Manihot esculenta), coffee (Coffea spp.), coconut (Cocos nucifera), pineapple (Ananas comosus), citrus trees (Citrus spp.), cocoa (Theobroma cacao), tea (Camellia sinensis), banana (Musa spp.), avocado (Persea americana), fig (Ficus casica), guava (Psidium guajava), mango (Mangifera indica), olive (Olea europaea), papaya (Carica papaya), cashew (Anacardium occidentale), macadamia (Macadamia integrifolia), almond (Prunus amygdalus), sugar beets (Beta vulgaris), sugarcane (Saccharum spp.), oats, barley, vegetables ornamentals, and conifers.

[0347] Vegetables include tomatoes (Lycopersicon esculentum), lettuce (e.g., Lactuca sativa), green beans (Phaseolus vulgaris), lima beans (Phaseolus limensis), peas (Lathyrus spp.), and members of the genus Cucumis such as cucumber (C. sativus), cantaloupe (C. cantalupensis), and musk melon (C. melo). Ornamentals include azalea (Rhododendron spp.), hydrangea (Macrophylla hydrangea), hibiscus (Hibiscus rosasanensis), roses (Rosa spp.), tulips (Tulipa spp.), daffodils (Narcissus spp.), petunias (Petunia hybrida), carnation (Dianthus caryophyllus), poinsettia (Euphorbia pulcherrima), and chrysanthemum. Conifers that may be employed in practicing the embodiments include, for example, pines such as loblolly pine (Pinus taeda), slash pine (Pinus elliotii), ponderosa pine (Pinus ponderosa), lodgepole pine (Pinus contorta), and Monterey pine (Pinus radiata); Douglas-fir (Pseudotsuga menziesii); Western hemlock (Tsuga canadensis); Sitka spruce (Picea glauca); redwood (Sequoia sempervirens); true firs such as silver fir (Abies amabilis) and balsam fir (Abies balsamea); and cedars such as Western red cedar (Thuja plicata) and Alaska yellow-cedar (Chamaecyparis nootkatensis). Plants of the embodiments include crop plants (for example, corn, alfalfa, sunflower, Brassica, soybean, cotton, safflower, peanut, sorghum, wheat, millet, tobacco, etc.), such as corn and soybean plants.

[0348] Turf grasses include, but are not limited to: annual bluegrass (Poa annus); annual ryegrass (Lolium multiflorum); Canada bluegrass (Poa compressa); Chewing's fescue (Festuca rubra); colonial bentgrass (Agrostis tenuis); creeping bentgrass (Agrostis palustris); crested wheatgrass (Agropyron desertorum); fairway wheatgrass (Agropyron cristatum); hard fescue (Festuca longifolia); Kentucky bluegrass (Poa pratensis); orchardgrass (Dactylis glomerata); perennial ryegrass (Lolium perenne); red fescue (Festuca rubra); redtop (Agrostis alba); rough bluegrass (Poa trivialis); sheep fescue (Festuca ovina); smooth bromegrass (Bromus inermis); tall fescue (Festuca arundinacea); timothy (Phleum pratense); velvet bentgrass (Agrostis canina); weeping alkaligrass (Puccinellia distans); western wheatgrass (Agropyron smithii); Bermuda grass (Cynodon spp.); St. Augustine grass (Stenotaphrum secundatum); zoysia grass (Zoysia spp.); Bahia grass (Paspalum notatum); carpet grass (Axonopus affinis); centipede grass (Eremochloa ophiuroides); kikuyu grass (Pennisetum clandesinum); seashore paspalum (Paspalum vaginatum); blue gramma (Bouteloua gracilis); buffalo grass (Buchloe dactyloids); sideoats gramma (Bouteloua curtipendula).

[0349] Plants of interest include grain plants that provide seeds of interest, oil-seed plants, and leguminous plants. Seeds of interest include grain seeds, such as corn, wheat, barley, rice, sorghum, rye, millet, etc. Oil-seed plants include cotton, soybean, safflower, sunflower, Brassica, maize, alfalfa, palm, coconut, flax, castor, olive, etc. Leguminous plants include beans and peas. Beans include guar, locust bean, fenugreek, soybean, garden beans, cowpea, mung bean, lima bean, fava bean, lentils, chickpea, etc.

### Evaluation of Plant Transformation

[0350] Following introduction of heterologous foreign DNA into plant cells, the transformation or integration of heterologous gene in the plant genome is confirmed by various methods such as analysis of nucleic acids, proteins and metabolites associated with the integrated gene.

[0351] PCR analysis is a rapid method to screen transformed cells, tissue or shoots for the presence of incorporated gene at the earlier stage before transplanting into the soil (Sambrook and Russell, (2001) Molecular Cloning: A Laboratory Manual. Cold Spring Harbor Laboratory Press, Cold Spring Harbor, N.Y.). PCR is carried out using oligonucleotide primers specific to the gene of interest or Agrobacterium vector background, etc.

[0352] Plant transformation may be confirmed by Southern blot analysis of genomic DNA (Sambrook and Russell, (2001) supra). In general, total DNA is extracted from the transformant, digested with appropriate restriction enzymes, fractionated in an agarose gel and transferred to a nitrocellulose or nylon membrane. The membrane or “blot” is then probed with, for example, radiolabeled 32P target DNA fragment to confirm the integration of introduced gene into the plant genome according to standard techniques (Sambrook and Russell, (2001) supra).

[0353] In Northern blot analysis, RNA is isolated from specific tissues of transformant, fractionated in a formaldehyde agarose gel, and blotted onto a nylon filter according to standard procedures that are routinely used in the art (Sambrook and Russell, (2001) supra). Expression of RNA encoded by the pesticidal gene is then tested by hybridizing the filter to a radioactive probe derived from a pesticidal gene.

[0354] Western blot, biochemical assays and the like may be carried out on the transgenic plants to confirm the presence of protein encoded by the pesticidal gene by standard procedures (Sambrook and Russell, 2001, supra) using antibodies that bind to one or more epitopes present on the polypeptide of the disclosure.

Methods to Introduce Genome Editing Technologies into Plants

[0355] In some embodiments, the disclosed polynucleotide compositions can be introduced into the genome of a plant using genome editing technologies or previously introduced polynucleotides in the genome of a plant may be edited using genome editing technologies. For example, the disclosed polynucleotides can be introduced into a desired location in the genome of a plant using double-stranded break technologies such as TALENs, meganucleases, zinc finger nucleases, CRISPR-Cas, and the like. For example, the disclosed polynucleotides can be introduced into a desired location in a genome using a CRISPR-Cas system, for site-specific insertion. The desired location in a plant genome can be any desired target site for insertion, such as a genomic region amenable for breeding or may be a target site located in a genomic window with an existing trait of interest. Existing traits of interest could be either an endogenous trait or a previously introduced trait.

[0356] In some embodiments, where the disclosed polynucleotide has previously been introduced into a genome, genome editing technologies may be used to alter or modify the introduced polynucleotide sequence. Site specific modifications that can be introduced into the disclosed polynucleotide compositions include those produced using any method for introducing site specific modification, including, but not limited to, using gene repair oligonucleotides (e.g. US Publication 2013/0019349) or using double-stranded break technologies such as TALENs, meganucleases, zinc finger nucleases, CRISPR-Cas, and the like. Such technologies can be used to modify the previously introduced polynucleotide through the insertion, deletion or substitution of nucleotides within the introduced polynucleotide. Alternatively, double-stranded break technologies can be used to add additional nucleotide sequences to the introduced polynucleotide. Additional sequences that may be added include, additional expression elements, such as enhancer and promoter sequences. In another embodiment, genome editing technologies may be used to position additional insecticidally-active proteins in close proximity to the disclosed polynucleotide compositions disclosed herein within the genome of a plant, to generate molecular stacks of insecticidally-active proteins.

[0357] An “altered target site,” “altered target sequence.” “modified target site,” and “modified target sequence” are used interchangeably herein and refer to a target sequence as disclosed herein that comprises at least one alteration when compared to non-altered target sequence. Such “alterations” include, for example: (i) replacement of at least one nucleotide, (ii) a deletion of at least one nucleotide, (iii) an insertion of at least one nucleotide or (iv) any combination of (i)-(iii).

### Stacking of Traits in Transgenic Plant

[0358] Transgenic plants may comprise a stack of one or more insecticidal polynucleotides disclosed herein with one or more additional polynucleotides resulting in the production or suppression of multiple polypeptide sequences. Transgenic plants comprising stacks of polynucleotide sequences can be obtained by either or both of traditional breeding methods or through genetic engineering methods. These methods include, but are not limited to, breeding individual lines each comprising a polynucleotide of interest, transforming a transgenic plant comprising a gene disclosed herein with a subsequent gene and co-transformation of genes into a single plant cell. As used herein, the term “stacked” includes having the multiple traits present in the same plant (i.e., both traits are incorporated into the nuclear genome, one trait is incorporated into the nuclear genome and one trait is incorporated into the genome of a plastid or both traits are incorporated into the genome of a plastid). In one non-limiting example, “stacked traits” comprise a molecular stack where the sequences are physically adjacent to each other. A trait, as used herein, refers to the phenotype derived from a sequence or groups of sequences. Co-transformation of genes can be carried out using single transformation vectors comprising multiple genes or genes carried separately on multiple vectors. If the sequences are stacked by genetically transforming the plants, the polynucleotide sequences of interest can be combined at any time and in any order. The traits can be introduced simultaneously in a co-transformation protocol with the polynucleotides of interest provided by any combination of transformation cassettes. For example, if two sequences will be introduced, the two sequences can be contained in separate transformation cassettes (trans) or contained on the same transformation cassette (cis). Expression of the sequences can be driven by the same promoter or by different promoters. In certain cases, it may be desirable to introduce a transformation cassette that will suppress the expression of the polynucleotide of interest. This may be combined with any combination of other suppression cassettes or overexpression cassettes to generate the desired combination of traits in the plant. It is further recognized that polynucleotide sequences can be stacked at a desired genomic location using a site-specific recombination system.

[0359] In some embodiments polynucleotides encoding the polypeptide of the disclosure, alone or stacked with one or more additional insect resistance traits can be stacked with one or more additional input traits (e.g., herbicide resistance, fungal resistance, virus resistance, stress tolerance, disease resistance, male sterility, stalk strength, and the like) or output traits (e.g., increased yield, modified starches, improved oil profile, balanced amino acids, high lysine or methionine, increased digestibility, improved fiber quality, drought resistance, and the like). Thus, the polynucleotide embodiments can be used to provide a complete agronomic package of improved crop quality with the ability to flexibly and cost effectively control any number of agronomic pests.

[0360] Transgenes useful for stacking include but are not limited to transgenes that confer resistance to insects or disease or herbicides.

[0361] Plant disease resistance genes. Plant defenses are often activated by specific interaction between the product of a disease resistance gene (R) in the plant and the product of a corresponding avirulence (Avr) gene in the pathogen. A plant variety can be transformed with cloned resistance gene to engineer plants that are resistant to specific pathogen strains. See, for example, Jones, et al., (1994) Science 266:789 (cloning of the tomato Cf-9 gene for resistance to Cladosporium fulvum); Martin, et al., (1993) Science 262:1432 (tomato Pto gene for resistance to Pseudomonas syringae pv. tomato encodes a protein kinase); Mindrinos, et al., (1994) Cell 78:1089 (Arabidopsis RSP2 gene for resistance to Pseudomonas syringae), McDowell and Woffenden, (2003) Trends Biotechnol. 21(4):178-83 and Toyoda, et al., (2002) Transgenic Res. 11(6):567-82. A plant resistant to a disease is one that is more resistant to a pathogen as compared to the wild type plant.

[0362] Genes encoding a Bacillus thuringiensis protein, a derivative thereof or a synthetic polypeptide modeled thereon. See, for example, Geiser, et al., (1986) Gene 48:109, who disclose the cloning and nucleotide sequence of a Bt delta-endotoxin gene. Moreover, DNA molecules encoding delta-endotoxin genes can be purchased from American Type Culture Collection (Rockville, Md.), for example, under ATCC® Accession Numbers 40098, 67136, 31995 and 31998. Other non-limiting examples of Bacillus thuringiensis transgenes being genetically engineered are given in the following patents and patent applications and hereby are incorporated by reference for this purpose: U.S. Pat. Nos. 5,188,960; 5,689,052; 5,880,275; 5,986,177; 6,023,013, 6,060,594, 6,063,597, 6,077,824, 6,620,988, 6,642,030, 6,713,259, 6,893,826, 7,105,332; 7,179,965, 7,208,474; 7,227,056, 7,288,643, 7,323,556, 7,329,736, 7,449,552, 7,468,278, 7,510,878, 7,521,235, 7,544,862, 7,605,304, 7,696,412, 7,629,504, 7,705,216, 7,772,465, 7,790,846, 7,858,849, 9,546,378; US Patent Publication US20160376607 and WO 1991/14778; WO 1999/31248; WO 2001/12731; WO 1999/24581 and WO 1997/40162.

[0363] Genes encoding pesticidal proteins may also be stacked including but are not limited to a “pesticidal toxin” or “pesticidal protein” or “insecticidal protein”, which are used herein to refer to a toxin that has toxic activity against one or more insect pests, including, but not limited to, members of the Lepidoptera, Diptera, Hemiptera and Coleoptera orders or the Nematoda phylum or a protein that has homology to such a protein. Pesticidal proteins have been isolated from organisms including, for example, Bacillus sp., Pseudomonas sp., Photorhabdus sp., Xenorhabdus sp., Clostridium bifermentans and Paenibacillus popilliae. Pesticidal proteins include but are not limited to: insecticidal proteins from Pseudomonas sp. such as PSEEN3174 (Monalysin; (2011) PLoS Pathogens 7:1-13); from Pseudomonas protegens strain CHAO and Pf-5 (previously fluorescens) (Pechy-Tarr, (2008) Environmental Microbiology 10:2368-2386; GenBank Accession No. EU400157); from Pseudomonas taiwanensis (Liu, et al., (2010) J. Agric. Food Chem., 58:12343-12349) and from Pseudomonas pseudoalcaligenes (Zhang, et al., (2009) Annals of Microbiology 59:45-50 and Li, et al., (2007) Plant Cell Tiss. Organ Cult. 89:159-168); insecticidal proteins from Photorhabdus sp. and Xenorhabdus sp. (Hinchliffe, et al., (2010) The Open Toxicology Journal, 3:101-118 and Morgan, et al., (2001) Applied and Envir. Micro. 67:2062-2069); U.S. Pat. Nos. 6,048,838, and 6,379,946; a PIP-1 polypeptide of U.S. Pat. No. 9,688,730; an AfIP-1A and/or AfIP-1B polypeptide of U.S. Pat. No. 9,475,847; a PIP-47 polypeptide of US Publication Number US20160186204; an IPD045 polypeptide, an IPD064 polypeptide, an IPD074 polypeptide, an IPD075 polypeptide, and an IPD077 polypeptide of PCT Publication Number WO 2016/114973; an IPD080 polypeptide of PCT Serial Number PCT/US17/56517; an IPD078 polypeptide, an IPD084 polypeptide, an IPD085 polypeptide, an IPD086 polypeptide, an IPD087 polypeptide, an IPD088 polypeptide, and an IPD089 polypeptide of Serial Number PCT/US17/54160; PIP-72 polypeptide of US Patent Publication Number US20160366891; a PtIP-50 polypeptide and a PtIP-65 polypeptide of US Publication Number US20170166921; an IPD098 polypeptide, an IPD059 polypeptide, an IPD108 polypeptide, an IPD109 polypeptide of U.S. Ser. No. 62/521084; a PtIP-83 polypeptide of US Publication Number US20160347799; a PtIP-96 polypeptide of US Publication Number US20170233440; an IPD079 polypeptide of PCT Publication Number WO2017/23486; an IPD082 polypeptide of PCT Publication Number WO 2017/105987, an IPD090 polypeptide of Serial Number PCT/US17/30602, an IPD093 polypeptide of U.S. Ser. No. 62/434020; an IPD103 polypeptide of Serial Number PCT/US17/39376; an IPD101 polypeptide of U.S. Ser. No. 62/438179; an IPD110 polypeptide of U.S. Ser. No. 62/642,644; an IPD113 polypeptide of U.S. Ser. No. 62/642,642; an IPD121 polypeptide of U.S. Ser. No. 62/508,514; and δ-endotoxins including, but not limited to a Cry1, Cry2, Cry3, Cry4, Cry5, Cry6, Cry7, Cry8, Cry9, Cry10, Cry11, Cry12, Cry13, Cry14, Cry15, Cry16, Cry17, Cry18, Cry19, Cry20, Cry21, Cry22, Cry23, Cry24, Cry25, Cry26, Cry27, Cry28, Cry29, Cry30, Cry31, Cry32, Cry33, Cry34, Cry35,Cry36, Cry37, Cry38, Cry39, Cry40, Cry41, Cry42, Cry43, Cry44, Cry45, Cry46, Cry47, Cry49, Cry50, Cry51, Cry52, Cry53, Cry54, Cry55, Cry56, Cry57, Cry58, Cry59, Cry60, Cry61, Cry62, Cry63, Cry64, Cry65, Cry66, Cry67, Cry68, Cry69, Cry70, Cry71, and Cry 72 classes of δ-endotoxin polypeptides and the B. thuringiensis cytolytic cyt1 and cyt2 genes. Members of these classes of B. thuringiensis insecticidal proteins well known to one skilled in the art (see, Crickmore, et al., “Bacillus thuringiensis toxin nomenclature” (2011), at lifesci.sussex.ac.uk/home/Neil_Crickmore/Bt/ which can be accessed on the world-wide web using the “www” prefix).

[0364] Examples of δ-endotoxins also include but are not limited to CrylA proteins of U.S. Pat. Nos. 5,880,275, 7,858,849, and 8,878,007; a Cry1Ac mutant of U.S. Pat. No. 9,512,187; a DIG-3 or DIG-11 toxin (N-terminal deletion of α-helix 1 and/or α-helix 2 variants of cry proteins such as Cry1A, Cry3A) of U.S. Pat. Nos. 8,304,604, 8.304,605 and 8,476,226; Cry1B of U.S. patent application Ser. No. 10/525,318, US Patent Application Publication Number US20160194364, and U.S. Pat. Nos. 9,404,121 and 8,772,577; Cry1B variants of PCT Publication Number WO2016/61197 and Serial Number PCT/US17/27160; Cry1C of U.S. Pat. No. 6,033,874; Cry1D protein of US20170233759; a Cry1E protein of PCT Serial Number PCT/US17/53178; a Cry1F protein of U.S. Pat. Nos. 5,188,960 and 6,218,188; Cry1A/F chimeras of U.S. Pat. Nos. 7,070,982; 6,962,705 and 6,713,063; a Cry1I protein of PCT Publication number WO 2017/0233759; a Cry1J variant of US Publication US20170240603; a Cry2 protein such as Cry2Ab protein of U.S. Pat. No. 7,064,249 and Cry2A.127 protein of U.S. Pat. No. 7,208,474; a Cry3A protein including but not limited to an engineered hybrid insecticidal protein (eHIP) created by fusing unique combinations of variable regions and conserved blocks of at least two different Cry proteins (US Patent Application Publication Number 2010/0017914); a Cry4 protein; a Cry5 protein; a Cry6 protein; Cry8 proteins of U.S. Pat. Nos. 7,329,736, 7,449,552, 7,803,943, 7,476,781, 7,105,332, 7,339,092, 7,378,499, 7,462,760, and 9,593,345; a Cry9 protein such as such as members of the Cry9A, Cry9B, Cry9C, Cry9D, Cry9E and Cry9F families including the Cry9 protein of U.S. Pat. Nos. 9,000,261 and 8,802,933, and US Serial Number WO 2017/132188; a Cry15 protein of Naimov, et al., (2008) Applied and Environmental Microbiology, 74:7145-7151; a Cry14 protein of U.S. Pat. No. 8,933,299; a Cry22, a Cry34Ab1 protein of U.S. Pat. Nos. 6,127,180, 6,624,145 and 6,340,593; a truncated Cry34 protein of U.S. Pat. No. 8,816,157; a CryET33 and cryET34 protein of U.S. Pat. Nos. 6,248,535, 6,326,351, 6,399,330, 6,949,626, 7,385,107 and 7,504,229; a CryET33 and CryET34 homologs of US Patent Publication Number 2006/0191034, 2012/0278954, and PCT Publication Number WO 2012/139004; a Cry35Ab1 protein of U.S. Pat. Nos. 6,083,499, 6,548,291 and 6,340,593; a Cry46 protein of U.S. Pat. No. 9,403,881, a Cry 51 protein, a Cry binary toxin; a TIC901 or related toxin; TIC807 of US Patent Application Publication Number 2008/0295207; TIC853 of U.S. Pat. No. 8,513,493; ET29, ET37, TIC809, TIC810, TIC812, TIC127, TIC128 of PCT US 2006/033867; engineered Hemipteran toxic proteins of US Patent Application Publication Number US20160150795, AXMI-027, AXMI-036, and AXMI-038 of U.S. Pat. No. 8,236,757; AXMI-031, AXMI-039, AXMI-040, AXMI-049 of U.S. Pat. No. 7,923,602; AXMI-018, AXMI-020 and AXMI-021 of WO 2006/083891; AXMI-010 of WO 2005/038032; AXMI-003 of WO 2005/021585; AXMI-008 of US Patent Application Publication Number 2004/0250311; AXMI-006 of US Patent Application Publication Number 2004/0216186; AXMI-007 of US Patent Application Publication Number 2004/0210965; AXMI-009 of US Patent Application Number 2004/0210964; AXMI-014 of US Patent Application Publication Number 2004/0197917; AXMI-004 of US Patent Application Publication Number 2004/0197916; AXMI-028 and AXMI-029 of WO 2006/119457; AXMI-007, AXMI-008, AXMI-0080rf2, AXMI-009, AXMI-014 and AXMI-004 of WO 2004/074462; AXMI-150 of U.S. Pat. No. 8,084,416; AXMI-205 of US Patent Application Publication Number 2011/0023184; AXMI-011, AXMI-012, AXMI-013, AXMI-015, AXMI-019, AXMI-044, AXMI-037, AXMI-043, AXMI-033, AXMI-034, AXMI-022, AXMI-023, AXMI-041, AXMI-063 and AXMI-064 of US Patent Application Publication Number 2011/0263488; AXMI046, AXMI048, AXMI050, AXMI051, AXMI052, AXMI053, AXMI054, AXMI055, AXMI056, AXMI057, AXMI058, AXMI059, AXMI060, AXMI061, AXMI067, AXMI069, AXMI071, AXMI072, AXMI073, AXMI074, AXMI075, AXMI087, AXMI088, AXMI093, AXMI070, AXMI080, AXMI081, AXMI082, AXMI091, AXMI092, AXMI096, AXMI097, AXMI098, AXMI099, AXMI100, AXMI101, AXMI102, AXMI103, AXMI104, AXMI107, AXMI108, AXMI109, AXMI110, AXMI111, AXMI112, AXMI114, AXMI116, AXMI117, AXMI118, AXMI119, AXMI120, AXMI121, AXMI122, AXMI123, AXMI124, AXMI125, AXMI126, AXMI127, AXMI129, AXMI151, AXMI161, AXMI164, AXMI183, AXMI132, AXMI137, AXMI138 of U.S. Pat. Nos. 8,461,421 and 8,461,422; AXMI-R1 and related proteins of US Patent Application Publication Number 2010/0197592; AXMI221Z, AXMI222z, AXMI223z, AXMI224z and AXMI225z of WO 2011/103248; AXMI218, AXMI219, AXMI220, AXMI226, AXMI227, AXMI228, AXMI229, AXMI230 and AXMI231 of WO 2011/103247; AXMI-115, AXMI-113, AXMI-005, AXMI-163 and AXMI-184 of U.S. Pat. No. 8,334,431; AXMI-001, AXMI-002, AXMI-030, AXMI-035 and AXMI-045 of US Patent Application Publication Number 2010/0298211; AXMI-066 and AXMI-076 of US Patent Application Publication Number 2009/0144852; AXMI128, AXMI130, AXMI131, AXMI133, AXMI140, AXMI141, AXMI142, AXMI143, AXMI144, AXMI146, AXMI148, AXMI149, AXMI152, AXMI153, AXMI154, AXMI155, AXMI156, AXMI157, AXMI158, AXMI162, AXMI165, AXMI166, AXMI167, AXMI168, AXMI169, AXMI170, AXMI171, AXMI172, AXMI173, AXMI174, AXMI175, AXMI176, AXMI177, AXMI178, AXMI179, AXMI180, AXMI181, AXMI182, AXMI185, AXMI186, AXMI187, AXMI188, AXMI189 of U.S. Pat. No. 8,318,900; AXMI079, AXMI080, AXMI081, AXMI082, AXMI091, AXMI092, AXMI096, AXMI097, AXMI098, AXMI099, AXMI100, AXMI101, AXMI102, AXMI103, AXMI104, AXMI107, AXMI108, AXMI109, AXMI110, dsAXMI111, AXMI112, AXMI114, AXMI116, AXMI117, AXMI118, AXMI119, AXMI120, AXMI121, AXMI122, AXMI123, AXMI124, AXMI1257, AXMI1268, AXMI127, AXMI129, AXMI164, AXMI151, AXMI161, AXMI183, AXMI132, AXMI138, AXMI137 of U.S. Pat. No. 8,461,421; AXMI192 of U.S. Pat. No. 8,461,415; AXMI281 of US Patent Application Publication Number US20160177332; AXMI422 of U.S. Pat. No. 8,252,872; cry proteins such as Cry1A and Cry3A having modified proteolytic sites of U.S. Pat. No. 8,319,019; a Cry1Ac, Cry2Aa and Cry1Ca toxin protein from Bacillus thuringiensis strain VBTS 2528 of US Patent Application Publication Number 2011/0064710. The Cry proteins MP032, MP049, MP051, MP066, MP068, MP070, MP091S, MP109S, MP114, MP121, MP134S, MP183S, MP185S, MP186S, MP195S, MP197S, MP208S, MP209S, MP212S, MP214S, MP217S, MP222S, MP234S, MP235S, MP237S, MP242S, MP243, MP248, MP249S, MP251M, MP252S, MP253, MP259S, MP287S, MP288S, MP295S, MP296S, MP297S, MP300S, MP304S, MP306S, MP310S, MP312S, MP314S, MP319S, MP325S, MP326S, MP327S, MP328S, MP334S, MP337S, MP342S, MP349S, MP356S, MP359S, MP360S, MP437S, MP451S, MP452S, MP466S, MP468S, MP476S, MP482S, MP522S, MP529S, MP548S, MP552S, MP562S, MP564S, MP566S, MP567S, MP569S, MP573S, MP574S, MP575S, MP581S, MP590, MP594S, MP596S, MP597, MP599S, MP600S, MP601S, MP602S, MP604S, MP626S, MP629S, MP630S, MP631S, MP632S, MP633S, MP634S, MP635S, MP639S, MP640S, MP644S, MP649S, MP651S, MP652S, MP653S, MP661S, MP666S, MP672S, MP696S, MP704S, MP724S, MP729S, MP739S, MP755S, MP773S, MP799S, MP800S, MP801S, MP802S, MP803S, MP805S, MP809S, MP815S, MP828S, MP831S, MP844S, MP852, MP865S, MP879S, MP887S, MP891S, MP896S, MP898S, MP935S, MP968, MP989, MP993, MP997, MP1049, MP1066, MP1067, MP1080, MP1081, MP1200, MP1206, MP1233, and MP1311 of U.S. Ser. No. 62/607,372. The insecticidal activity of Cry proteins is well known to one skilled in the art (for review, see, van Frannkenhuyzen, (2009) J. Invert. Path. 101:1-16). The use of Cry proteins as transgenic plant traits is well known to one skilled in the art and Cry-transgenic plants including but not limited to plants expressing Cry1Ac, Cry1Ac+Cry2Ab, Cry1Ab, Cry1A.105, Cry1F, Cry1Fa2, Cry1F+Cry1Ac, Cry2Ab, Cry3A, mCry3A, Cry3Bb1, Cry34Ab1, Cry35Ab1, Vip3A, mCry3A, Cry9c and CBI-Bt have received regulatory approval (see, Sanahuja, (2011) Plant Biotech Journal 9:283-300 and the CERA. (2010) GM Crop Database Center for Environmental Risk Assessment (CERA), ILSI Research Foundation, Washington D.C. at cera-gmc.org/index.php?action=gm_crop_database which can be accessed on the world-wide web using the “www” prefix). More than one pesticidal proteins well known to one skilled in the art can also be expressed in plants such as Vip3Ab & Cry1Fa (US2012/0317682); Cry1BE & Cry1F (US2012/0311746); Cry1CA & Cry1AB (US2012/0311745); Cry1F & CryCa (US2012/0317681); Cry1DA & Cry1BE (US2012/0331590); Cry1DA & Cry1Fa (US2012/0331589); Cry1AB & Cry1BE (US2012/0324606); Cry1Fa & Cry2Aa and Cry1I & Cry1E (US2012/0324605); Cry34Ab/35Ab & Cry6Aa (US20130167269); Cry34Ab/VCry35Ab & Cry3Aa (US20130167268); Cry1Da & Cry1Ca (U.S. Pat. No. 9,796,982); Cry3Aa & Cry6Aa (U.S. Pat. No. 9,798,963); and Cry3A & Cry1Ab or Vip3Aa (U.S. Pat. No. 9,045,766). Pesticidal proteins also include insecticidal lipases including lipid acyl hydrolases of U.S. Pat. No. 7,491,869, and cholesterol oxidases such as from Streptomyces (Purcell et al. (1993) Biochem Biophys Res Commun 15:1406-1413). Pesticidal proteins also include VIP (vegetative insecticidal proteins) toxins of U.S. Pat. Nos. 5,877,012, 6,107,279 6,137,033, 7,244,820, 7,615,686, and 8,237,020 and the like. Other VIP proteins are well known to one skilled in the art (see, lifesci.sussex.ac.uk/home/Neil_Crickmore/Bt/vip.html which can be accessed on the world-wide web using the “www” prefix). Pesticidal proteins also include Cyt proteins including Cyt1A variants of PCT Serial Number PCT/US2017/000510; Pesticidal proteins also include toxin complex (TC) proteins, obtainable from organisms such as Xenorhabdus, Photorhabdus and Paenibacillus (see, U.S. Pat. Nos. 7,491,698 and 8,084,418). Some TC proteins have “stand alone” insecticidal activity and other TC proteins enhance the activity of the stand-alone toxins produced by the same given organism. The toxicity of a “stand-alone” TC protein (from Photorhabdus, Xenorhabdus or Paenibacillus, for example) can be enhanced by one or more TC protein “potentiators” derived from a source organism of a different genus. There are three main types of TC proteins. As referred to herein, Class A proteins (“Protein A”) are stand-alone toxins. Class B proteins (“Protein B”) and Class C proteins (“Protein C”) enhance the toxicity of Class A proteins. Examples of Class A proteins are TcbA, TcdA, XptA1 and XptA2. Examples of Class B proteins are TcaC, TcdB, XptB1Xb and XptC1Wi. Examples of Class C proteins are TccC, XptC1Xb and XptB1Wi. Pesticidal proteins also include spider, snake and scorpion venom proteins. Examples of spider venom peptides include but not limited to lycotoxin-1 peptides and mutants thereof (U.S. Pat. No. 8,334,366). The combinations generated can also include multiple copies of any one of the polynucleotides of interest.

[0365] Transgenes that confer resistance to a herbicide, for Example: A polynucleotide encoding resistance to a herbicide that inhibits the growing point or meristem, such as an imidazolinone or a sulfonylurea. Exemplary genes in this category code for mutant ALS and AHAS enzyme as described, for example, by Lee, et al., (1988) EMBO J. 7:1241 and Miki, et al., (1990) Theor. Appl. Genet. 80:449, respectively. See also, U.S. Pat. Nos. 5,605,011; 5,013,659; 5,141,870; 5,767,361; 5,731,180; 5,304,732; 4,761,373; 5,331,107; 5,928,937 and 5,378,824; U.S. patent application Ser. No. 11/683,737 and International Publication WO 1996/33270. A polynucleotide encoding a protein for resistance to Glyphosate (resistance imparted by mutant 5-enolpyruvl-3-phosphikimate synthase (EPSP) and aroA genes, respectively) and other phosphono compounds such as glufosinate (phosphinothricin acetyl transferase (PAT) and Streptomyces hygroscopicus phosphinothricin acetyl transferase (bar) genes), and pyridinoxy or phenoxy proprionic acids and cyclohexones (ACCase inhibitor-encoding genes). See, for example, U.S. Pat. No. 4,940,835 to Shah, et al., which discloses the nucleotide sequence of a form of EPSPS which can confer glyphosate resistance. U.S. Pat. No. 5,627,061 to Barry, et al., also describes genes encoding EPSPS enzymes. See also, U.S. Pat. Nos. 6,566,587; 6,338,961; 6,248,876; 6,040,497; 5,804,425; 5,633,435; 5,145,783; 4,971,908; 5,312,910; 5,188,642; 5,094,945, 4,940,835; 5,866,775; 6,225,114; 6,130,366; 5,310,667; 4,535,060; 4,769,061; 5,633,448; 5,510,471; Re. 36,449; RE 37,287 E and 5,491,288 and International Publications EP 1173580; WO 2001/66704; EP 1173581 and EP 1173582, which are incorporated herein by reference for this purpose. Glyphosate resistance is also imparted to plants that express a gene encoding a glyphosate oxido-reductase enzyme as described more fully in U.S. Pat. Nos. 5,776,760 and 5,463,175, which are incorporated herein by reference for this purpose. In addition, glyphosate resistance can be imparted to plants by the over expression of genes encoding glyphosate N-acetyltransferase. See, for example, U.S. Pat. Nos. 7,462,481; 7,405,074 and US Patent Application Publication Number US 2008/0234130.

[0366] In some embodiments, the stacked trait may be in the form of silencing of one or more polynucleotides of interest resulting in suppression of one or more target pest polypeptides. In some embodiments, the silencing is achieved using a suppression DNA construct include, without limitation, cosuppression constructs, antisense constructs, viral-suppression constructs, hairpin suppression constructs, stem-loop suppression constructs, double-stranded RNA-producing constructs, and more generally, RNAi (RNA interference) constructs and small RNA constructs such as siRNA (short interfering RNA) constructs and miRNA (microRNA) constructs.

[0367] In some embodiments, the stacked trait may be selected from events with regulatory approval which can be found at the Center for Environmental Risk Assessment (cera-gmc.org/?action=gm_crop_database, which can be accessed using the www prefix) and at the International Service for the Acquisition of Agri-Biotech Applications isaaa.org/gmapprovaldatabase/default.asp, which can be accessed using the www prefix).

### Use in Pesticidal Control

[0368] General methods for employing strains comprising a nucleic acid sequence of the embodiments or a variant thereof, in pesticide control or in engineering other organisms as pesticidal agents can be used.

[0369] Microorganism hosts that are known to occupy the “phytosphere” (phylloplane, phyllosphere, rhizosphere, and/or rhizoplana) of one or more crops of interest may be selected. These microorganisms are selected to be capable of successfully competing in the particular environment with the wild-type microorganisms, provide for stable maintenance and expression of the gene expressing the polypeptide of the disclosure and desirably provide for improved protection of the pesticide from environmental degradation and inactivation.

[0370] Alternatively, the polypeptide of the disclosure is produced by introducing a heterologous gene into a cellular host. Expression of the heterologous gene results, directly or indirectly, in the intracellular production and maintenance of the pesticide. These cells are then treated under conditions that prolong the activity of the toxin produced in the cell when the cell is applied to the environment of target pest(s). The resulting product retains the toxicity of the toxin. These naturally encapsulated polypeptides of the disclosure may then be formulated in accordance with conventional techniques for application to the environment hosting a target pest, e.g., soil, water, and foliage of plants. See, for example EPA 0192319, and the references cited therein.

### Pesticidal Compositions

[0371] In some embodiments, the active ingredients can be applied in the form of compositions and can be applied to the crop area or plant to be treated, simultaneously or in succession, with other compounds. These compounds can be fertilizers, weed killers, Cryoprotectants, surfactants, detergents, pesticidal soaps, dormant oils, polymers, and/or time-release or biodegradable carrier formulations that permit long-term dosing of a target area following a single application of the formulation. They can also be selective herbicides, chemical insecticides, virucides, microbicides, amoebicides, pesticides, fungicides, bacteriocides, nematocides, molluscicides or mixtures of several of these preparations, if desired, together with further agriculturally acceptable carriers, surfactants or application-promoting adjuvants customarily employed in the art of formulation. Suitable carriers and adjuvants can be solid or liquid and correspond to the substances ordinarily employed in formulation technology, e.g. natural or regenerated mineral substances, solvents, dispersants, wetting agents, tackifiers, binders or fertilizers. Likewise, the formulations may be prepared into edible “baits” or fashioned into pest “traps” to permit feeding or ingestion by a target pest of the pesticidal formulation.

[0372] Methods of applying an active ingredient or an agrochemical composition that contains at least one of the polypeptide of the disclosure produced by the bacterial strains include leaf application, seed coating and soil application. The number of applications and the rate of application depend on the intensity of infestation by the corresponding pest.

[0373] The composition may be formulated as a powder, dust, pellet, granule, spray, emulsion, colloid, solution or such like, and may be prepared by such conventional means as desiccation, lyophilization, homogenation, extraction, filtration, centrifugation, sedimentation or concentration of a culture of cells comprising the polypeptide. In all such compositions that contain at least one such pesticidal polypeptide, the polypeptide may be present in a concentration of from about 1% to about 99% by weight.

[0374] Lepidopteran, Dipteran, Heteropteran, nematode, Hemiptera or Coleopteran pests may be killed or reduced in numbers in a given area by the methods of the disclosure or may be prophylactically applied to an environmental area to prevent infestation by a susceptible pest. Preferably the pest ingests or is contacted with, a pesticidally-effective amount of the polypeptide. “Pesticidally-effective amount” as used herein refers to an amount of the pesticide that can bring about death to at least one pest or to noticeably reduce pest growth, feeding or normal physiological development. This amount will vary depending on such factors as, for example, the specific target pests to be controlled, the specific environment, location, plant, crop or agricultural site to be treated, the environmental conditions and the method, rate, concentration, stability, and quantity of application of the pesticidally-effective polypeptide composition. The formulations may also vary with respect to climatic conditions, environmental considerations, and/or frequency of application and/or severity of pest infestation.

[0375] The pesticide compositions described may be made by formulating either the bacterial cell, Crystal and/or spore suspension or isolated protein component with the desired agriculturally-acceptable carrier. The compositions may be formulated prior to administration in an appropriate means such as lyophilized, freeze-dried, desiccated or in an aqueous carrier, medium or suitable diluent, such as saline or another buffer. The formulated compositions may be in the form of a dust or granular material or a suspension in oil (vegetable or mineral) or water or oil/water emulsions or as a wettable powder or in combination with any other carrier material suitable for agricultural application. Suitable agricultural carriers can be a solid or liquid. The term “agriculturally-acceptable carrier” covers all adjuvants, inert components, dispersants, surfactants, tackifiers, binders, etc. that are ordinarily used in pesticide formulation technology. The formulations may be mixed with one or more solid or liquid adjuvants and prepared by various means, e.g., by homogeneously mixing, blending and/or grinding the pesticidal composition with suitable adjuvants using conventional formulation techniques. Suitable formulations and application methods are described in US Patent Number 6,468,523, herein incorporated by reference. The plants can also be treated with one or more chemical compositions, including one or more herbicide, insecticides or fungicides. Exemplary chemical compositions include: Fruits/Vegetables Herbicides: Atrazine, Bromacil, Diuron, Glyphosate, Linuron, Metribuzin, Simazine, Trifluralin, Fluazifop, Glufosinate, Halo sulfuron Gowan, Paraquat, Propyzamide, Sethoxydim, Butafenacil, Halosulfuron, Indaziflam; Fruits/Vegetables Insecticides: Aldicarb, Bacillus thuriengiensis, Carbaryl, Carbofuran, Chlorpyrifos, Cypermethrin, Deltamethrin, Diazinon, Malathion, Abamectin, Cyfluthrin/beta-cyfluthrin, Esfenvalerate, Lam bda-cyhalothrin, Acequinocyl, Bifenazate, Methoxyfenozide, Novaluron, Chromafenozide, Thiacloprid, Dinotefuran, FluaCrypyrim, Tolfenpyrad, Clothianidin, Spirodiclofen, Gamma-cyhalothrin, Spiromesifen, Spinosad, Rynaxypyr, Cyazypyr, Spinoteram, Triflumuron, Spirotetramat, Imidacloprid, Flubendiamide, Thiodicarb, Metaflumizone, Sulfoxaflor, Cyflumetofen, Cyanopyrafen, Imidacloprid, Clothianidin, Thiamethoxam, Spinotoram, Thiodicarb, Flonicamid, Methiocarb, Emamectin-benzoate, Indoxacarb, Forthiazate, Fenamiphos, Cadusaphos, Pyriproxifen, Fenbutatin-oxid, Hexthiazox, Methomyl, 4-[[(6-Chlorpyridin-3-yl)methyl](2,2-difluorethyl)amino]furan-2(5H)-on; Fruits/Vegetables Fungicides: Carbendazim, Chlorothalonil, EBDCs, Sulphur, Thiophanate-methyl, Azoxystrobin, Cymoxanil, Fluazinam, Fosetyl, Iprodione, Kresoxim-methyl, Metalaxyl/mefenoxam, Trifloxystrobin, Ethaboxam, Iprovalicarb, Trifloxystrobin, Fenhexamid, Oxpoconazole fumarate, Cyazofamid, Fenamidone, Zoxamide, Zorvec™, Picoxystrobin, Pyraclostrobin, Cyflufenamid, Boscalid; Cereals Herbicides: Isoproturon, Bromoxynil, loxynil, Phenoxies, Chlorsulfuron, Clodinafop, Diclofop, Diflufenican, Fenoxaprop, Florasulam, Fluoroxypyr, Metsulfuron, Triasulfuron, Flucarbazone, lodosulfuron, Propoxycarbazone, Picolinafen, Mesosulfuron, Beflubutamid, Pinoxaden, Amidosulfuron, Thifensulfuron Methyl, Tribenuron, Flupyrsulfuron, Sulfosulfuron, Pyrasulfotole, Pyroxsulam, Flufenacet, Tralkoxydim, Pyroxasulfon; Cereals Fungicides: Carbendazim, Chlorothalonil, Azoxystrobin, Cyproconazole, Cyprodinil, Fenpropimorph, Epoxiconazole, Kresoxim-methyl, Quinoxyfen, Tebuconazole, Trifloxystrobin, Simeconazole, Picoxystrobin, Pyraclostrobin, Dimoxystrobin, Prothioconazole, Fluoxastrobin; Cereals Insecticides: Dimethoate, Lambda-cyhalthrin, Deltamethrin, alpha-Cypermethrin, β-cyfluthrin, Bifenthrin, Imidacloprid, Clothianidin, Thiamethoxam, Thiacloprid, Acetamiprid, Dinetofuran, Clorphyriphos, Metamidophos, Oxidemethon-methyl, Pirimicarb, Methiocarb; Maize Herbicides: Atrazine, Alachlor, Bromoxynil, Acetochlor, Dicamba, Clopyralid, (S-) Dimethenamid, Glufosinate, Glyphosate, Isoxaflutole, (S-)Metolachlor, Mesotrione, Nicosulfuron, Primisulfuron, Revulin Q®; in Rimsulfuron, Sulcotrione, Foramsulfuron, Topramezone, Tern botrione, Saflufenacil, Thiencarbazone, Flufenacet, Pyroxasulfon; Maize Insecticides: Carbofuran, Chlorpyrifos, Bifenthrin, Fipronil, Imidacloprid, Lambda-Cyhalothrin, Tefluthrin, Terbufos, Thiamethoxam, Clothianidin, Spiromesifen, Flubendiamide, Triflumuron, Rynaxypyr, Deltamethrin, Thiodicarb, β-Cyfluthrin, Cypermethrin, Bifenthrin, Lufenuron, Triflumoron, Tefluthrin,Tebupirimphos, Ethiprole, Cyazypyr, Thiacloprid, Acetamiprid, Dinetofuran, Avermectin, Methiocarb, Spirodiclofen, Spirotetramat; Maize Fungicides: Fenitropan, Thiram, Prothioconazole, Tebuconazole, Trifloxystrobin; Rice Herbicides: Butachlor, Propanil, Azimsulfuron, Bensulfuron, Cyhalofop, Daimuron, Fentrazamide, Imazosulfuron, Mefenacet, Oxaziclomefone, Pyrazosulfuron, Pyributicarb, Quinclorac, Thiobencarb, Indanofan, Flufenacet, Fentrazamide, Halosulfuron, Oxaziclomefone, Benzobicyclon, Pyriftalid, Penoxsulam, Bispyribac, Oxadiargyl, Ethoxysulfuron, Pretilachlor, Mesotrione, Tefuryltrione, Oxadiazone, Fenoxaprop, Pyrimisulfan; Rice Insecticides: Diazinon, Fenitrothion, Fenobucarb, Monocrotophos, Benfuracarb, Buprofezin, Dinotefuran, Fipronil, Imidacloprid, Isoprocarb, Thiacloprid, Chromafenozide, Thiacloprid, Dinotefuran, Clothianidin, Ethiprole, Flubendiamide, Rynaxypyr, Deltamethrin, Acetamiprid, Thiamethoxam, Cyazypyr, Spinosad, Spinotoram, Emamectin-Benzoate, Cypermethrin, Chlorpyriphos, Cartap, Methamidophos, Etofenprox, Triazophos, 4-[[(6-Chlorpyridin-3-yl)methyl](2,2-difluorethyl)amino]furan-2(5H)-on, Carbofuran, Benfuracarb; Rice Fungicides: Thiophanate-methyl, Azoxystrobin, Carpropamid, Edifenphos, Ferimzone, Iprobenfos, Isoprothiolane, Pencycuron, Probenazole, Pyroquilon, Tricyclazole, Trifloxystrobin, Diclocymet, Fenoxanil, Simeconazole, Tiadinil; Cotton Herbicides: Diuron, Fluometuron, MSMA, Oxyfluorfen, Prometryn, Trifluralin, Carfentrazone, Clethodim, Fluazifop-butyl, Glyphosate, Norflurazon, Pendimethalin, Pyrithiobac-sodium, Trifloxysulfuron, Tepraloxydim, Glufosinate, Flumioxazin, Thidiazuron; Cotton Insecticides: Acephate, Aldicarb, Chlorpyrifos, Cypermethrin, Deltamethrin, Malathion, Monocrotophos, Abamectin, Acetamiprid, Emamectin Benzoate, Imidacloprid, Indoxacarb, Lambda-Cyhalothrin, Spinosad, Thiodicarb, Gamma-Cyhalothrin, Spiromesifen, Pyridalyl, Flonicamid, Flubendiamide, Triflumuron, Rynaxypyr, Beta-Cyfluthrin, Spirotetramat, Clothianidin, Thiamethoxam, Thiacloprid, Dinetofuran, Flubendiamide, Cyazypyr, Spinosad, Spinotoram, gamma Cyhalothrin, 4-[[(6-Chlorpyridin-3-yl)methyl](2,2-difluorethyl)amino]furan-2(5H)-on, Thiodicarb, Avermectin, Flonicamid, Pyridalyl, Spiromesifen, Sulfoxaflor, Profenophos, Thriazophos, Endosulfan; Cotton Fungicides: Etridiazole, Metalaxyl, Quintozene; Soybean Herbicides: Alachlor, Bentazone, Trifluralin, Chlorimuron-Ethyl, Cloransulam-Methyl, Fenoxaprop, Fomesafen, Fluazifop, Glyphosate, Imazamox, Imazaquin, Imazethapyr, (S-Metolachlor, Metribuzin, Pendimethalin, Tepraloxydim, Glufosinate; Soybean Insecticides: Lambda-cyhalothrin, Methomyl, Parathion, Thiocarb, Imidacloprid, Clothianidin, Thiamethoxam, Thiacloprid, Acetamiprid, Dinetofuran, Flubendiamide, Rynaxypyr, Cyazypyr, Spinosad, Spinotoram, Emamectin-Benzoate, Fipronil, Ethiprole, Deltamethrin, β-Cyfluthrin, gamma and lambda Cyhalothrin, 4-[[(6-Chlorpyridin-3-yl)methyl](2,2-difluorethyl)amino]furan-2(5H)-on, Spirotetramat, Spinodiclofen, Triflumuron, Flonicamid, Thiodicarb, beta-Cyfluthrin; Soybean Fungicides: Azoxystrobin, Cyproconazole, Epoxiconazole, Flutriafol, Pyraclostrobin, Tebuconazole, Trifloxystrobin, Prothioconazole, Tetraconazole; Sugarbeet Herbicides: Chloridazon, Desmedipham, Ethofumesate, Phenmedipham, Triallate, Clopyralid, Fluazifop, Lenacil, Metamitron, Quinmerac, Cycloxydim, Triflusulfuron, Tepraloxydim, Quizalofop; Sugarbeet Insecticides: Imidacloprid, Clothianidin, Thiamethoxam, Thiacloprid, Acetamiprid, Dinetofuran, Deltamethrin, β-Cyfluthrin, gamma/lambda Cyhalothrin, 4-[[(6-Chlorpyridin-3-yl)methyl](2,2-difluorethyl)amino]furan-2(5H)-on, Tefluthrin, Rynaxypyr, Cyaxypyr, Fipronil, Carbofuran; Canola Herbicides: Clopyralid, Diclofop, Fluazifop, Glufosinate, Glyphosate, Metazachlor, Trifluralin Ethametsulfuron, Quinmerac, Quizalofop, Clethodim, Tepraloxydim; Canola Fungicides: Azoxystrobin, Carbendazim, Fludioxonil, Iprodione, Prochloraz, Vinclozolin; Canola Insecticides: Carbofuran organophosphates, Pyrethroids, Thiacloprid, Deltamethrin, Imidacloprid, Clothianidin, Thiamethoxam, Acetamiprid, Dinetofuran, β-Cyfluthrin, gamma and lambda Cyhalothrin, tau-Fluvaleriate, Ethiprole, Spinosad, Spinotoram, Flubendiamide, Rynaxypyr, Cyazypyr, 4-[[(6-Chlorpyridin-3-yl)methyl](2,2-difluorethyl)amino]furan-2(5H)-on.

[0376] In some embodiments, the herbicide is Atrazine, Bromacil, Diuron, Chlorsulfuron, Metsulfuron, Thifensulfuron Methyl, Tribenuron, Acetochlor, Dicamba, Isoxaflutole, Nicosulfuron, Rimsulfuron, Pyrithiobac-sodium, Flumioxazin, Chlorimuron-Ethyl, Metribuzin, Quizalofop, S-metolachlor, Hexazinne or combinations thereof.

[0377] In some embodiments, the insecticide is Esfenvalerate, Chlorantraniliprole, Methomyl, Indoxacarb, Oxamyl or combinations thereof.

### Pesticidal and Insecticidal Activity

[0378] “Pest” includes but is not limited to, insects, fungi, bacteria, nematodes, mites, ticks and the like. Insect pests include insects selected from the orders Coleoptera, Diptera, Hymenoptera, Lepidoptera, Mallophaga, Homoptera, Hemiptera Orthroptera, Thysanoptera, Dermaptera, Isoptera, Anoplura, Siphonaptera, Trichoptera, etc., particularly Lepidoptera and Coleoptera.

[0379] Those skilled in the art will recognize that not all compounds are equally effective against all pests. Compounds of the embodiments display activity against insect pests, which may include economically important agronomic, forest, greenhouse, nursery ornamentals, food and fiber, public and animal health, domestic and commercial structure, household and stored product pests.

[0380] Larvae of the order Lepidoptera include, but are not limited to, armyworms, cutworms, loopers and heliothines in the family Noctuidae Spodoptera frugiperda (fall armyworm); Spodoptera exigua Hübner (beet armyworm); Spodoptera litura Fabricius (tobacco cutworm, cluster caterpillar); Mamestra configurata Walker (bertha armyworm); Mamestra brassicae Linnaeus (cabbage moth); Agrotis ipsilon Hufnagel (black cutworm); Agrotis orthogonia Morrison (western cutworm); Agrotis subterranea Fabricius (granulate cutworm); Alabama argillacea Hübner (cotton leaf worm); Trichoplusia ni Hübner (cabbage looper); Pseudoplusia includens Walker (soybean looper); Anticarsia gemmatalis Hübner (velvetbean caterpillar); Hypena scabra Fabricius (green cloverworm); Heliothis virescens Fabricius (tobacco budworm); Pseudaletia unipuncta Haworth (armyworm); Athetis mindara Barnes and Mcdunnough (rough skinned cutworm); Euxoa messoria Harris (darksided cutworm); Earias insulana Boisduval (spiny bollworm); Earias vittella Fabricius (spotted bollworm); Helicoverpa armigera Hübner (American bollworm); H. zea Boddie (corn earworm or cotton bollworm); Melanchra picta Harris (zebra caterpillar); Egira (Xylomyges) curialis Grote (citrus cutworm); borers, casebearers, webworms, coneworms, and skeletonizers from the family Pyralidae Ostrinia nubilalis Hübner (European corn borer); Amyelois transitella Walker (naval orangeworm); Anagasta kuehniella Zeller (Mediterranean flour moth); Cadra cautella Walker (almond moth); Chilo suppressalis Walker (rice stem borer); Chilo partellus, (sorghum borer); Corcyra cephalonica Stainton (rice moth); Crambus caliginosellus Clemens (corn root webworm); Crambus teterrellus Zincken (bluegrass webworm); Cnaphalocrocis medinalis Guenée (rice leaf roller); Desmia funeralis Hübner (grape leaffolder); Diaphania hyalinata Linnaeus (melon worm); Diaphania nitidalis Stoll (pickleworm); Diatraea grandiosella Dyar (southwestern corn borer), Diatraea saccharalis Fabricius (surgarcane borer); Eoreuma loftini Dyar (Mexican rice borer); Ephestia elutella Hübner (tobacco (cacao) moth); Galleria mellonella Linnaeus (greater wax moth); Herpetogramma licarsisalis Walker (sod webworm); Homoeosoma electellum Hulst (sunflower moth); Elasmopalpus lignosellus Zeller (lesser cornstalk borer); Achroia grisella Fabricius (lesser wax moth); Loxostege sticticalis Linnaeus (beet webworm); Orthaga thyrisalis Walker (tea tree web moth); Maruca testulalis Geyer (bean pod borer); Plodia interpunctella Hübner (Indian meal moth); Scirpophaga incertulas Walker (yellow stem borer); Udea rubigalis Guenée (celery leaftier); and leafrollers, budworms, seed worms and fruit worms in the family Tortricidae Acleris gloverana Walsingham (Western blackheaded budworm); Acleris variana Fernald (Eastern blackheaded budworm); Archips argyrospila Walker (fruit tree leaf roller); Archips rosana Linnaeus (European leaf roller); and other Archips species, Adoxophyes orana Fischer von Rösslerstamm (summer fruit tortrix moth); Cochylis hospes Walsingham (banded sunflower moth); Cydia latiferreana Walsingham (filbertworm); Cydia pomonella Linnaeus (coding moth); Platynota flavedana Clemens (variegated leafroller); Platynota stultana Walsingham (omnivorous leafroller); Lobesia botrana Denis & Schiffermüller (European grape vine moth); Spilonota ocellana Denis & Schiffermüller (eyespotted bud moth); Endopiza viteana Clemens (grape berry moth); Eupoecilia ambiguella Hübner (vine moth); Bonagota salubricola Meyrick (Brazilian apple leafroller); Grapholita molesta Busck (oriental fruit moth); Suleima helianthana Riley (sunflower bud moth); Argyrotaenia spp.; Choristoneura spp.

[0381] Selected other agronomic pests in the order Lepidoptera include, but are not limited to, Alsophila pometaria Harris (fall cankerworm); Anarsia lineatella Zeller (peach twig borer); Anisota senatoria (orange striped oakworm); Antheraea pernyi Guérin-Méneville (Chinese Oak Tussah Moth); Bombyx mori Linnaeus (Silkworm); Bucculatrix thurberiella Busck (cotton leaf perforator); Colias eurytheme Boisduval (alfalfa caterpillar); Datana integerrima Grote & Robinson (walnut caterpillar); Dendrolimus sibiricus Tschetwerikov (Siberian silk moth), Ennomos subsignaria Hübner (elm spanworm); Erannis tiliaria Harris (linden looper); Euproctis chrysorrhoea Linnaeus (browntail moth); Harrisina americana Guérin-Méneville (grapeleaf skeletonizer); Hemileuca oliviae Cockrell (range caterpillar); Hyphantria cunea Drury (fall webworm); Keiferia lycopersicella Walsingham (tomato pinworm); Lambdina fiscellaria fiscellaria Hulst (Eastern hemlock looper); L. fiscellaria lugubrosa Hulst (Western hemlock looper); Leucoma salicis Linnaeus (satin moth); Lymantria dispar Linnaeus (gypsy moth); Manduca quinquemaculata Haworth (five spotted hawk moth, tomato hornworm); M. sexta Haworth (tomato hornworm, tobacco hornworm); Operophtera brumata Linnaeus (winter moth); Paleacrita vemata Peck (spring cankerworm); Papilio cresphontes Cramer (giant swallowtail orange dog); Phryganidia califomica Packard (California oakworm); Phyllocnistis citrella Stainton (citrus leafminer); Phyllonorycter blancardella Fabricius (spotted tentiform leafminer); Pieris brassicae Linnaeus (large white butterfly); P. rapae Linnaeus (small white butterfly); P. napi Linnaeus (green veined white butterfly); Platyptilia carduidactyla Riley (artichoke plume moth); Plutella xylostella Linnaeus (diamondback moth); Pectinophora gossypiella Saunders (pink bollworm); Pontia protodice Boisduval and Leconte (Southern cabbageworm); Sabulodes aegrotata Guenée (omnivorous looper); Schizura concinna J. E. Smith (red humped caterpillar); Sitotroga cerealella Olivier (Angoumois grain moth); Thaumetopoea pityocampa Schiffermuller (pine processionary caterpillar); Tineola bisselliella Hummel (webbing clothesmoth); Tuta absoluta Meyrick (tomato leafminer); Yponomeuta padella Linnaeus (ermine moth); Heliothis subflexa Guenée; Malacosoma spp. and Orgyia spp.

[0382] Of interest are larvae and adults of the order Coleoptera including weevils from the families Anthribidae, Bruchidae and Curculionidae (including, but not limited to: Anthonomus grandis Boheman (boll weevil); Lissorhoptrus oryzophilus Kuschel (rice water weevil); Sitophilus granarius Linnaeus (granary weevil); S. oryzae Linnaeus (rice weevil); Hypera punctata Fabricius (clover leaf weevil); Cylindrocopturus adspersus LeConte (sunflower stem weevil); Smicronyx fulvus LeConte (red sunflower seed weevil); S. sordidus LeConte (gray sunflower seed weevil); Sphenophorus maidis Chittenden (maize billbug)); flea beetles, cucumber beetles, rootworms, leaf beetles, potato beetles and leafminers in the family Chrysomelidae (including, but not limited to: Leptinotarsa decemlineata Say (Colorado potato beetle); Diabrotica virgifera virgifera LeConte (western corn rootworm); D. barberi Smith and Lawrence (northern corn rootworm); D. undecimpunctata howardi Barber (southern corn rootworm); Chaetocnema pulicaria Melsheimer (corn flea beetle); Phyllotreta cruciferae Goeze (Crucifer flea beetle); Phyllotreta striolata (stripped flea beetle); Colaspis brunnea Fabricius (grape colaspis); Oulema melanopus Linnaeus (cereal leaf beetle); Zygogramma exclamationis Fabricius (sunflower beetle)); beetles from the family Coccinellidae (including, but not limited to: Epilachna varivestis Mulsant (Mexican bean beetle)); chafers and other beetles from the family Scarabaeidae (including, but not limited to: Popillia japonica Newman (Japanese beetle); Cyclocephala borealis Arrow (northern masked chafer, white grub); C. immaculata Olivier (southern masked chafer, white grub); Rhizotrogus majalis Razoumowsky (European chafer); Phyllophaga crinita Burmeister (white grub); Ligyrus gibbosus De Geer (carrot beetle)); carpet beetles from the family Dermestidae; wireworms from the family Elateridae, Eleodes spp., Melanotus spp.; Conoderus spp.; Limonius spp.; Agriotes spp.; Ctenicera spp.; Aeolus spp.; bark beetles from the family Scolytidae and beetles from the family Tenebrionidae.

[0383] Adults and immatures of the order Diptera are of interest, including leafminers Agromyza parvicomis Loew (corn blotch leafminer); midges (including, but not limited to: Contarinia sorghicola Coquillett (sorghum midge); Mayetiola destructor Say (Hessian fly); Sitodiplosis mosellana Géhin (wheat midge); Neolasioptera murtfeldtiana Felt, (sunflower seed midge)); fruit flies (Tephritidae), Oscinella frit Linnaeus (fruit flies); maggots (including, but not limited to: Delia platura Meigen (seedcorn maggot); D. coarctata Fallen (wheat bulb fly) and other Delia spp., Meromyza americana Fitch (wheat stem maggot); Musca domestica Linnaeus (house flies); Fannia canicularis Linnaeus, F. femoralis Stein (lesser house flies); Stomoxys calcitrans Linnaeus (stable flies)); face flies, horn flies, blow flies, Chrysomya spp.; Phormia spp. and other muscoid fly pests, horse flies Tabanus spp.; bot flies Gastrophilus spp.; Oestrus spp.; cattle grubs Hypoderma spp.; deer flies Chrysops spp.; Melophagus ovinus Linnaeus (keds) and other Brachycera, mosquitoes Aedes spp.; Anopheles spp.; Culex spp.; black flies Prosimulium spp.; Simulium spp.; biting midges, sand flies, sciarids, and other Nematocera.

[0384] Included as insects of interest are adults and nymphs of the orders Hemiptera and Homoptera such as, but not limited to, adelgids from the family Adelgidae, plant bugs from the family Miridae, cicadas from the family Cicadidae, leafhoppers, Empoasca spp.; from the family Cicadellidae, planthoppers from the families Cixiidae, Flatidae, Fulgoroidea, lssidae and Delphacidae, treehoppers from the family Membracidae, psyllids from the family Psyllidae, whiteflies from the family Aleyrodidae, aphids from the family Aphididae, phylloxera from the family Phylloxeridae, mealybugs from the family Pseudococcidae, scales from the families Asterolecanidae, Coccidae, Dactylopiidae, Diaspididae, Eriococcidae Ortheziidae, Phoenicococcidae and Margarodidae, lace bugs from the family Tingidae, stink bugs from the family Pentatomidae, cinch bugs, Blissus spp.; and other seed bugs from the family Lygaeidae, spittlebugs from the family Cercopidae squash bugs from the family Coreidae and red bugs and cotton stainers from the family Pyrrhocoridae.

[0385] Agronomically important members from the order Homoptera further include, but are not limited to: Acyrthisiphon pisum Harris (pea aphid); Aphis craccivora Koch (cowpea aphid); A. fabae Scopoli (black bean aphid); A. gossypii Glover (cotton aphid, melon aphid); A. maidiradicis Forbes (corn root aphid); A. pomi De Geer (apple aphid); A. spiraecola Patch (spirea aphid); Aulacorthum solani Kaltenbach (foxglove aphid); Chaetosiphon fragaefolii Cockerell (strawberry aphid); Diuraphis noxia Kurdjumov/Mordvilko (Russian wheat aphid); Dysaphis plantaginea Paaserini (rosy apple aphid); Eriosoma lanigerum Hausmann (woolly apple aphid); Brevicoryne brassicae Linnaeus (cabbage aphid); Hyalopterus pruni Geoffroy (mealy plum aphid); Lipaphis erysimi Kaltenbach (turnip aphid); Metopolophium dirrhodum Walker (cereal aphid); Macrosiphum euphorbiae Thomas (potato aphid); Myzus persicae Sulzer (peach-potato aphid, green peach aphid); Nasonovia ribisnigri Mosley (lettuce aphid); Pemphigus spp. (root aphids and gall aphids); Rhopalosiphum maidis Fitch (corn leaf aphid); R. padi Linnaeus (bird cherry-oat aphid); Schizaphis graminum Rondani (greenbug); Sipha flava Forbes (yellow sugarcane aphid); Sitobion avenae Fabricius (English grain aphid); Therioaphis maculata Buckton (spotted alfalfa aphid); Toxoptera aurantii Boyer de Fonscolombe (black citrus aphid) and T. citricida Kirkaldy (brown citrus aphid); Adelges spp. (adelgids); Phylloxera devastatrix Pergande (pecan phylloxera); Bemisia tabaci Gennadius (tobacco whitefly, sweetpotato whitefly); B. argentifolii Bellows & Perring (silverleaf whitefly); Dialeurodes citri Ashmead (citrus whitefly); Trialeurodes abutiloneus (bandedwinged whitefly) and T. vaporariorum Westwood (greenhouse whitefly); Empoasca fabae Harris (potato leafhopper); Laodelphax striatellus Fallen (smaller brown planthopper); Macrolestes quadrilineatus Forbes (aster leafhopper); Nephotettix cinticeps Uhler (green leafhopper); N. nigropictus StåI (rice leafhopper); Nilaparvata lugens StåI (brown planthopper); Peregrinus maidis Ashmead (corn planthopper); Sogatella furcifera Horvath (white-backed planthopper); Sogatodes orizicola Muir (rice delphacid); Typhlocyba pomaria McAtee (white apple leafhopper); Erythroneoura spp. (grape leafhoppers); Magicicada septendecim Linnaeus (periodical cicada); Icerya purchasi Maskell (cottony cushion scale); Quadraspidiotus perniciosus Comstock (San Jose scale); Planococcus citri Risso (citrus mealybug); Pseudococcus spp. (other mealybug complex); Cacopsylla pyricola Foerster (pear psylla); Trioza diospyri Ashmead (persimmon psylla).

[0386] Agronomically important species of interest from the order Hemiptera include, but are not limited to: Acrosternum hilare Say (green stink bug); Anasa tristis De Geer (squash bug); Blissus leucopterus leucopterus Say (chinch bug); Corythuca gossypii Fabricius (cotton lace bug); Cyrtopeltis modesta Distant (tomato bug); Dysdercus suturellus Herrich-Schäffer (cotton stainer); Euschistus servus Say (brown stink bug); E. variolarius Palisot de Beauvois (one-spotted stink bug); Graptostethus spp. (complex of seed bugs); Leptoglossus corculus Say (leaf-footed pine seed bug); Lygus lineolaris Palisot de Beauvois (tarnished plant bug); L. hesperus Knight (Western tarnished plant bug); L. pratensis Linnaeus (common meadow bug); L. rugulipennis Poppius (European tarnished plant bug); Lygocoris pabulinus Linnaeus (common green capsid); Nezara viridula Linnaeus (southern green stink bug); Oebalus pugnax Fabricius (rice stink bug); Oncopeltus fasciatus Dallas (large milkweed bug); Pseudatomoscelis seriatus Reuter (cotton fleahopper).

[0387] Furthermore, embodiments may be effective against Hemiptera such, Calocoris norvegicus Gmelin (strawberry bug); Orthops campestris Linnaeus; Plesiocoris rugicollis Fallen (apple capsid); CyrtopeIlls modestus Distant (tomato bug); CyrtopeIlls notatus Distant (suckfly); Spanagonicus albofasciatus Reuter (whitemarked fleahopper); Diaphnocoris chlorionis Say (honeylocust plant bug); Labopidicola allii Knight (onion plant bug); Pseudatomoscelis seriatus Reuter (cotton fleahopper); Adelphocoris rapidus Say (rapid plant bug); Poecilocapsus lineatus Fabricius (four-lined plant bug); Nysius ericae Schilling (false chinch bug); Nysius raphanus Howard (false chinch bug); Nezara viridula Linnaeus (Southern green stink bug); Eurygaster spp.; Coreidae spp.; Pyrrhocoridae spp.; Tinidae spp.; Blostomatidae spp.; Reduviidae spp. and Cimicidae spp.

[0388] Also included are adults and larvae of the order Acari (mites) such as Aceria tosichella Keifer (wheat curl mite); Petrobia latens Müller (brown wheat mite); spider mites and red mites in the family Tetranychidae, Panonychus ulmi Koch (European red mite); Tetranychus urticae Koch (two spotted spider mite); (T. mcdanieli McGregor (McDaniel mite); T. cinnabarinus Boisduval (carmine spider mite); T. turkestani Ugarov & Nikolski (strawberry spider mite); flat mites in the family Tenuipalpidae, Brevipalpus lewisi McGregor (citrus flat mite); rust and bud mites in the family Eriophyidae and other foliar feeding mites and mites important in human and animal health, i.e., dust mites in the family Epidermoptidae, follicle mites in the family Demodicidae, and grain mites in the family Glycyphagidae.

[0389] Insect pest of interest include the superfamily of stink bugs and other related insects including but not limited to species belonging to the family Pentatomidae (Nezara viridula, Halyomorpha halys, Piezodorus guildini, Euschistus servus, Acrosternum hilare, Euschistus heros, Euschistus tristigmus, Acrosternum hilare, Dichelops furcatus, Dichelops melacanthus, and Bagrada hilaris (Bagrada Bug)), the family Plataspidae (Megacopta cribraria—Bean plataspid) and the family Cydnidae (Scaptocoris castanea—Root stink bug) and Lepidoptera species including but not limited to: diamond-back moth, e.g., Helicoverpa zea Boddie; soybean looper, e.g., Pseudoplusia includens Walker and velvet bean caterpillar e.g., Anticarsia gemmatalis Hübner.

[0390] Methods for measuring pesticidal activity can be found in Czapla and Lang, (1990) J. Econ. Entomol. 83:2480-2485; Andrews, et al., (1988) Biochem. J. 252:199-206; Marrone, et al., (1985) J. of Economic Entomology 78:290-293 and U.S. Pat. No. 5,743,477, all of which are herein incorporated by reference in their entirety. Generally, the protein is mixed and used in feeding assays. See, for example Marrone, et al., (1985) J. of Economic Entomology 78:290-293. Such assays can include contacting plants with one or more pests and determining the plant's ability to survive and/or cause the death of the pests.

[0391] Nematodes include parasitic nematodes such as root-knot, cyst and lesion nematodes, including Heterodera spp., Meloidogyne spp. and Globodera spp.; particularly members of the cyst nematodes, including, but not limited to, Heterodera glycines (soybean cyst nematode); Heterodera schachtii (beet cyst nematode); Heterodera avenae (cereal cyst nematode) and Globodera rostochiensis and Globodera pailida (potato cyst nematodes). Lesion nematodes include Pratylenchus spp.

### Seed Treatment

[0392] To protect and to enhance yield production and trait technologies, seed treatment options can provide additional crop plan flexibility and cost effective control against insects, weeds and diseases. Seed material can be treated, typically surface treated, with a composition comprising combinations of chemical or biological herbicides, herbicide safeners, insecticides, fungicides, germination inhibitors and enhancers, nutrients, plant growth regulators and activators, bactericides, nematocides, avicides and/or molluscicides. These compounds are typically formulated together with further carriers, surfactants or application-promoting adjuvants customarily employed in the art of formulation. The coatings may be applied by impregnating propagation material with a liquid formulation or by coating with a combined wet or dry formulation. Examples of the various types of compounds that may be used as seed treatments are provided in The Pesticide Manual: A World Compendium, C.D.S. Tomlin Ed., Published by the British Crop Production Council, which is hereby incorporated by reference.

[0393] Some seed treatments that may be used on crop seed include, but are not limited to, one or more of abscisic acid, acibenzolar-S-methyl, avermectin, amitrol, azaconazole, azospirillum, azadirachtin, azoxystrobin, Bacillus spp. (including one or more of cereus, firmus, megaterium, pumilis, sphaericus, subtilis and/or thuringiensis species), Bradyrhizobium spp. (including one or more of betae, canariense, elkanii, iriomotense, japonicum, liaonigense, pachyrhizi and/or yuanmingense), captan, carboxin, chitosan, clothianidin, copper, cyazypyr, difenoconazole, etidiazole, fipronil, fludioxonil, fluoxastrobin, fluquinconazole, flurazole, fluxofenim, harpin protein, imazalil, imidacloprid, ipconazole, isoflavenoids, lipo-chitooligosaccharide, mancozeb, manganese, maneb, mefenoxam, metalaxyl, metconazole, myclobutanil, PCNB, penflufen, penicillium, penthiopyrad, permethrine, picoxystrobin, prothioconazole, pyraclostrobin, rynaxypyr, S-metolachlor, saponin, sedaxane, TCMTB, tebuconazole, thiabendazole, thiamethoxam, thiocarb, thiram, tolclofos-methyl, triadimenol, trichoderma, trifloxystrobin, triticonazole and/or zinc. PCNB seed coat refers to EPA Registration Number 00293500419, containing quintozen and terrazole. TCMTB refers to 2-(thiocyanomethylthio) benzothiazole.

[0394] Seed varieties and seeds with specific transgenic traits may be tested to determine which seed treatment options and application rates may complement such varieties and transgenic traits to enhance yield. For example, a variety with good yield potential but head smut susceptibility may benefit from the use of a seed treatment that provides protection against head smut, a variety with good yield potential but cyst nematode susceptibility may benefit from the use of a seed treatment that provides protection against cyst nematode, and so on. Likewise, a variety encompassing a transgenic trait conferring insect resistance may benefit from the second mode of action conferred by the seed treatment, a variety encompassing a transgenic trait conferring herbicide resistance may benefit from a seed treatment with a safener that enhances the plants resistance to that herbicide, etc. Further, the good root establishment and early emergence that results from the proper use of a seed treatment may result in more efficient nitrogen use, a better ability to withstand drought and an overall increase in yield potential of a variety or varieties containing a certain trait when combined with a seed treatment.

### Methods for Killing an Insect Pest and Controlling an Insect Population

[0395] In some embodiments methods are provided for killing an insect pest, comprising contacting the insect pest, either simultaneously or sequentially, with an insecticidally-effective amount of a recombinant polypeptide of the disclosure.

[0396] In some embodiments methods are provided for controlling an insect pest population, comprising contacting the insect pest population, either simultaneously or sequentially, with an insecticidally-effective amount of a recombinant polypeptide of the disclosure. As used herein, “controlling a pest population” or “controls a pest” refers to any effect on a pest that results in limiting the damage that the pest causes. Controlling a pest includes, but is not limited to, killing the pest, inhibiting development of the pest, altering fertility or growth of the pest in such a manner that the pest provides less damage to the plant, decreasing the number of offspring produced, producing less fit pests, producing pests more susceptible to predator attack or deterring the pests from eating the plant.

[0397] In some embodiments methods are provided for controlling an insect pest population resistant to a pesticidal protein, comprising contacting the insect pest population, either simultaneously or sequentially, with an insecticidally-effective amount of a recombinant polypeptide of the disclosure.

[0398] In some embodiments methods are provided for protecting a plant from an insect pest, comprising expressing in the plant or cell thereof at least one recombinant polynucleotide encoding a polypeptide of the disclosure.

[0399] In some embodiments methods are provided for protecting a plant from an insect pest, comprising expressing in the plant or cell thereof a recombinant polynucleotide encoding a polypeptide of the disclosure.

### Insect Resistance Management (IRM) Strategies

[0400] Expression of B. thuringiensis δ-endotoxins in transgenic corn plants has proven to be an effective means of controlling agriculturally important insect pests (Perlak, et al., 1990; 1993). However, insects have evolved that are resistant to B. thuringiensis δ-endotoxins expressed in transgenic plants. Such resistance, should it become widespread, would clearly limit the commercial value of germplasm containing genes encoding such B. thuringiensis δ-endotoxins.

[0401] One way to increasing the effectiveness of the transgenic insecticides against target pests and contemporaneously reducing the development of insecticide-resistant pests is to use provide non-transgenic (i.e., non-insecticidal protein) refuges (a section of non-insecticidal crops/corn) for use with transgenic crops producing a single insecticidal protein active against target pests. The United States Environmental Protection Agency (epa.gov/oppbppdl/biopesticides/pips/bt_corn_refuge_2006.htm, which can be accessed using the www prefix) publishes the requirements for use with transgenic crops producing a single Bt protein active against target pests. In addition, the National Corn Growers Association, on their website: (ncga.com/insect-resistance-management-fact-sheet-bt-corn, which can be accessed using the www prefix) also provides similar guidance regarding refuge requirements. Due to losses to insects within the refuge area, larger refuges may reduce overall yield.

[0402] Another way of increasing the effectiveness of the transgenic insecticides against target pests and contemporaneously reducing the development of insecticide-resistant pests would be to have a repository of insecticidal genes that are effective against groups of insect pests and which manifest their effects through different modes of action.

[0403] Expression in a plant of two or more insecticidal compositions toxic to the same insect species, each insecticide being expressed at efficacious levels would be another way to achieve control of the development of resistance. This is based on the principle that evolution of resistance against two separate modes of action is far more unlikely than only one. Roush, for example, outlines two-toxin strategies, also called “pyramiding” or “stacking,” for management of insecticidal transgenic crops. (The Royal Society. Phil. Trans. R. Soc. Lond. B. (1998) 353:1777-1786). Stacking or pyramiding of two different proteins each effective against the target pests and with little or no cross-resistance can allow for use of a smaller refuge. The US Environmental Protection Agency requires significantly less (generally 5%) structured refuge of non-Bt corn be planted than for single trait products (generally 20%). There are various ways of providing the IRM effects of a refuge, including various geometric planting patterns in the fields and in-bag seed mixtures, as discussed further by Roush.

[0404] In some embodiments, the polypeptides of the disclosure are useful as an insect resistance management strategy in combination (i.e., pyramided) with other pesticidal proteins include but are not limited to Bt toxins, Xenorhabdus sp. or Photorhabdus sp. insecticidal proteins, other insecticidally active proteins, and the like.

[0405] Provided are methods of controlling Lepidoptera and/or Coleoptera insect infestation(s) in a transgenic plant that promote insect resistance management, comprising expressing in the plant at least two different insecticidal proteins having different modes of action.

[0406] In some embodiments, the methods of controlling Lepidoptera and/or Coleoptera insect infestation in a transgenic plant and promoting insect resistance management comprises the presentation of at least one of the polypeptide of the disclosure to insects in the order Lepidoptera and/or Coleoptera.

[0407] In some embodiments, the methods of controlling Lepidoptera and/or Coleoptera insect infestation in a transgenic plant and promoting insect resistance management comprise expressing in the transgenic plant a polypeptide of the disclosure and a Cry protein or other insecticidal protein to insects in the order Lepidoptera and/or Coleoptera having different modes of action.

[0408] Also provided are methods of reducing likelihood of emergence of Lepidoptera and/or Coleoptera insect resistance to transgenic plants expressing in the plants insecticidal proteins to control the insect species, comprising expression of a polypeptide of the disclosure insecticidal to the insect species in combination with a second insecticidal protein to the insect species having different modes of action.

[0409] Also provided are means for effective Lepidoptera and/or Coleoptera insect resistance management of transgenic plants, comprising co-expressing at high levels in the plants two or more insecticidal proteins toxic to Lepidoptera and/or Coleoptera insects but each exhibiting a different mode of effectuating its killing activity, wherein the two or more insecticidal proteins comprise a polypeptide of the disclosure and a Cry protein. Also provided are means for effective Lepidoptera and/or Coleoptera insect resistance management of transgenic plants, comprising co-expressing at high levels in the plants two or more insecticidal proteins toxic to Lepidoptera and/or Coleoptera insects but each exhibiting a different mode of effectuating its killing activity, wherein the two or more insecticidal proteins comprise a polypeptide of the disclosure and a Cry protein or other insecticidally active protein.

[0410] In addition, methods are provided for obtaining regulatory approval for planting or commercialization of plants expressing proteins insecticidal to insects in the order Lepidoptera and/or Coleoptera, comprising the step of referring to, submitting or relying on insect assay binding data showing that the polypeptide of the disclosure does not compete with binding sites for Cry proteins in such insects. In addition, methods are provided for obtaining regulatory approval for planting or commercialization of plants expressing proteins insecticidal to insects in the order Lepidoptera and/or Coleoptera, comprising the step of referring to, submitting or relying on insect assay binding data showing that the polypeptide of the disclosure does not compete with binding sites for Cry proteins in such insects.

### Methods for Increasing Plant Yield

[0411] Methods for increasing plant yield are provided. The methods comprise providing a plant or plant cell expressing a polynucleotide encoding the pesticidal polypeptide sequence disclosed herein and growing the plant or a seed thereof in a field infested with a pest against which the polypeptide has pesticidal activity. In some embodiments, the polypeptide has pesticidal activity against a Lepidopteran, Coleopteran, Dipteran, Hemipteran or nematode pest, and the field is infested with a Lepidopteran, Hemipteran, Coleopteran, Dipteran or nematode pest.

[0412] As defined herein, the “yield” of the plant refers to the quality and/or quantity of biomass produced by the plant. “Biomass” as used herein refers to any measured plant product. An increase in biomass production is any improvement in the yield of the measured plant product. Increasing plant yield has several commercial applications. For example, increasing plant leaf biomass may increase the yield of leafy vegetables for human or animal consumption. Additionally, increasing leaf biomass can be used to increase production of plant-derived pharmaceutical or industrial products. An increase in yield can comprise any statistically significant increase including, but not limited to, at least a 1% increase, at least a 3% increase, at least a 5% increase, at least a 10% increase, at least a 20% increase, at least a 30%, at least a 50%, at least a 70%, at least a 100% or a greater increase in yield compared to a plant not expressing the pesticidal sequence.

[0413] In specific methods, plant yield is increased as a result of improved pest resistance of a plant expressing a polypeptide of the disclosure. Expression of the polypeptide of the disclosure results in a reduced ability of a pest to infest or feed on the plant, thus improving plant yield.

### Methods of Processing

[0414] Further provided are methods of processing a plant, plant part or seed to obtain a food or feed product from a plant, plant part or seed comprising a polynucleotide encoding a polypeptide of the disclosure. The plants, plant parts or seeds provided herein, can be processed to yield oil, protein products and/or by-products that are derivatives obtained by processing that have commercial value. Non-limiting examples include transgenic seeds comprising a nucleic acid molecule encoding a polypeptide of the disclosure which can be processed to yield soy oil, soy products and/or soy by-products.

[0415] “Processing” refers to any physical and chemical methods used to obtain any soy product and includes, but is not limited to, heat conditioning, flaking and grinding, extrusion, solvent extraction or aqueous soaking and extraction of whole or partial seeds

[0416] The following examples are offered by way of illustration and not by way of limitation.

### EXPERIMENTALS

### Example 1

### Coleopteran Assays

[0417] Bioassays with Western corn rootworm (Diabrotica virgifera virgifera LeConte, WCRW) were conducted using cell lysate samples mixed with Diabrotica diet (Frontier Agricultural Sciences, Newark, Del.). WCRW neonates were placed into each well of a 96 well plate. The assay was run four days at 25° C. and was then scored for insect mortality and stunting of larval growth. The scores were noted as dead (3), severely stunted (2) (little or no growth but alive), stunted (1) (growth to second instar but not equivalent to controls) or no activity (0). Samples demonstrating mortality or stunting were further studied.

### Example 2

### Identification of Bacterial Strains Active Against WCRW

[0418] Insecticidal activities against WCRW were observed from a clear cell lysate of bacterial strains grown in either LB medium (10 g/L tryptone, 5 g/L yeast extract, and 10 g/L NaCl) or TSB (Tryptic Soy Broth) medium (17 g/L tryptone, 3 g/L Soytone, 2.5 g/L dextrose, 2.5 g/L K₂HPO₄ and 5 g/L NaCl), 2× YT medium (yeast extract 10 g/L, pancreatic digest of casein 16 g/L, sodium chloride 5 g/L), ISP-2 medium (yeast extract, 4 g/L, malt extract, 10 g/L, dextrose, 4 g/L) and cultured as specified in Table 2. This insecticidal activity exhibited heat and proteinase sensitivity indicating proteinaceous nature. Active strains and their culture conditions are listed in Table 2.

TABLE 2

| | | Culture | Culture | | |
|---|---|---|---|---|---|
| Strain | Species | Medium | condition | Gene | Seq. No. |
| SS473A12 | Pseudomonas | TSB | 26° C., 190 rpm, | IPD092Aa-1 | SEQ ID NO: 546 |
| | rhodesiae | | 2 days | IPD092-2Aa | SEQ ID NO: 547 |
| SS232H12 | Serratia | TSB | 26° C., 190 rpm, | IPD095Aa-1 | SEQ ID NO: 562 |
| | nematophilia | | 2 days | IPD095-2Aa | SEQ ID NO: 563 |
| JH58776-1 | Haemophilus | 2xYT | 28° C., 200 rpm, | IPD097Aa | SEQ ID NO: 590 |
| | piscium | | 1 day | IPD099Aa-1 | SEQ ID NO: 591 |
| | | | | IPD099-2Aa | SEQ ID NO: 592 |
| | | | | IPD099Aa-3 | SEQ ID NO: 593 |
| JH55673-1 | Pseudomonas | TSB | 28° C., 160 rpm, | IPD100Aa-1 | SEQ ID NO: 611 |
| | gessardii | | 1 day | IPD100-2Aa | SEQ ID NO: 612 |
| JH90961-1 | Chromobacterium | 2xYT | 28° C., 200 rpm, | IPD105Aa | SEQ ID NO: 614 |
| | aquaticum | | 1 day | | |
| JH48820-1 | Chitinophaga | 2xYT | 28° C., 200 rpm, | IPD106Aa-1 | SEQ ID NO: 617 |
| | pinensis | | 1 day | IPD106-2Aa | SEQ ID NO: 618 |
| JH60888-1 | Pseudomonas | ISP-2 | 26° C., 250 rpm, | IPD107Aa | SEQ ID NO: 621 |
| | brassicacearum | | 1 day | | |
| JH59138-1 | Burkholderia | 2xYT | 28° C., 160 rpm, | IPD111Aa | SEQ ID NO: 629 |
| | ambifaria | | 1 day | | |
| SSP640H4-1 | Pseudomonas | TSB | 26° C., 210 rpm, | IPD112Aa | SEQ ID NO: 635 |
| | vranovensis | | 2 days | | |

### Example 3

### Species Identification and Genome SequencinG of Active Strains

[0419] Genomic DNA from active strains was extracted with a Sigma® Bacterial Genomic DNA Extraction Kit (Cat #NA2110-KT, Sigma-Aldrich, PO Box 14508, St. Louis, Mo. 63178) according to the manufactures' instructions. The DNA concentration was determined using a NanoDrop™ Spectrophotometer (Thermo Scientific, Wilmington, Del.) and the genomic DNA was diluted to 40 ng/μL with sterile water. A 25 μL PCR reaction was set up by combining 80 ng genomic DNA, 2 μL (5 μM) 16S ribosomal DNA primers TACCTTGTTACGACTT (SEQ ID NO: 639) and AGAGTTTGATCMTGGCTCAG (SEQ ID NO: 640), 1 μL 10 cmM dNTP, 1× Phusion® HF buffer, and 1 unit of Phusion® High-Fidelity DNA Polymerase (New England Biolabs, Ipswich, Mass.). The PCR reaction was run in MJ Research PTC-200 Thermo Cycler (Bio-Rad Laboratories, Inc., Hercules, Calif.) with the following program: 96° C. 1 min; 30 cycles of 96° C. 15 seconds, 52° C. 2 minutes and 72° C. 2 minutes; 72° C. 10 minutes; and hold on 4° C. The PCR products were purified with QiaQuick® DNA purification Kit (Cat #28104, QIAGEN Inc., Valencia, Calif.). The purified PCR sample was DNA sequenced and the resulting 16S ribosomal DNA sequence was BLAST® searched against the NCBI database for indication of the species of the strain (see Table 2).

[0420] Genomic DNA of active strains was also prepared according to a library construction protocol developed by Illumina (San Diego, Calif.) and sequenced using the Illumina MiSeq™. The nucleic acid contig sequences were assembled and open reading frames were generated.

### Example 4

### Identification of Insecticidal Proteins by LC-MS/MS

[0421] All insecticidal proteins were fractionated and enriched as described. For identification candidate protein bands from SDS PAGE gels were excised, digested with trypsin and analyzed by nano-liquid chromatography/electrospray tandem mass spectrometry (nano-LC/ESI-MS/MS) on a Thermo Q Exactive™ Orbitrap™ mass spectrometer (Thermo Fisher Scientific®) interfaced with an Eksigent® NanoLC Ultra 1D Plus™ NanoLC system (AB Sciex). Alternatively, the proteins in the chromatography fractions were directly digested with trypsin and then analyzed by nano-LC/ESI-MS/MS. Ten product ion spectra were collected in data dependent acquisition mode after a precursor ion survey scan.

[0422] Protein identification was done by database searches using Mascot® (Matrix Science). The databases were an in-house database “Bacteria-purify” which contains annotated protein sequences of bacterial genomes, as well as other in-house protein sequence databases, and Swiss-Prot.

### Example 5

### Isolation and Identification of Insecticidal Proteins

### Isolation and Identification of IPD092-1Aa and IPD092-2Aa

[0423] Insecticidal activity against WCRW (Diabrotica virgifera virgifera) was observed from crude cell lysates of Pseudomonas rhodesiae Strain SS473A12 grown in TSB (Tryptic Soy Broth) medium (17 g/L tryptone, 3 g/L Soytone, 2.5 g/L dextrose, 2.5 g/L K₂HPO₄ and 5 g/L NaCl), at 26° C., with shaking at 190 rpm for 2 days. This insecticidal activity exhibited heat and protease sensitivity indicating a proteinaceous nature.

[0424] Cell pellets of strain SS473A12 were lysed at ˜30,000 psi (Constant Systems Ltd. Low March, Daventry Northants, United Kingdom) after re-suspension in 25 mM MES buffer, pH 6 with Protease Inhibitor Cocktail Set V, EDTA-Free (Calbiochem/EMD Millipore, Darmstadt,

[0425] Germany). The crude lysate was cleared by centrifugation, readjusted to pH 6 and loaded onto a tandem of two 5 mL HiTrap™ SP-HPTM (GE Healthcare, Piscataway, N.J.) columns equilibrated in MES buffer, pH 6. Insecticidal activity eluted with a gradient of 0 to 300 mM NaCl over 20 column volumes (CV). Active fractions were pooled, adjusted to 1 M ammonium sulfate by addition of a 4 M ammonium sulfate stock solution, and loaded onto a tandem of two 1 mL HiTrap™ Phenyl HPTM (GE Healthcare, Piscataway, N.J.) columns that were equilibrated in 25 mM MES pH 6. A gradient from 1 to 0 M ammonium sulfate was applied over 22 CV. Eluted active fractions were pooled and buffer exchanged using Zeba™ (Thermo Scientific) columns to 25 mM Tris, pH 8, and loaded onto a Mono Q™ (GE Healthcare, Piscataway, N.J.) column equilibrated in 25 mM Tris, pH 8. Active fractions eluted with a gradient from 0 to 500 mM NaCl over 30 CV. Active fractions were pooled, concentrated on 10 kDa molecular weight cutoff centrifugal concentrators (Sartorius Stedim, Goettingen, Germany) and loaded onto a Superdex™ 200 column (GE Healthcare) equilibrated in 25 mM Tris pH 8, 150 mM NaCl. SDS-PAGE analysis of fractions indicated that WCRW activity coincided with two prominent bands after staining with InstantBlue™ (Expedeon Ltd., San Diego, Calif.). The approximately 21 and 22 kDa protein bands were excised, digested with trypsin and analyzed by nano-liquid chromatography/electrospray tandem mass spectrometry (nano-LC/ESI-MS/MS) as described in Example 4. Searches against an in-house database, including the genomic sequence of SS473A12 which was generated as described in Example 3 identified the IPD092-1Aa polypeptide (SEQ ID NO: 1) and IPD092-2Aa (SEQ ID NO: 2) which are encoded by the polynucleotides of SEQ ID NO: 546 and SEQ ID NO: 547, respectively. The genes encoding IPD092-1Aa and IPD092-2Aa were in a single operon.

[0426] Cloning and recombinant co-expression confirmed the insecticidal activity of the IPD092-1Aa polypeptide (SEQ ID NO: 1) and IPD092-2Aa polypeptide (SEQ ID NO: 2) against WCRW.

### Isolation and Identification of IPD095-1Aa and IPD095-2Aa

[0427] Insecticidal activity against WCRW (Diabrotica virgifera virgifera) was observed from cleared cell lysates of Serratia nematophilia Strain SS232H12 grown in TSB (Tryptic Soy Broth) medium (17 g/L tryptone, 3 g/L Soytone, 2.5 g/L dextrose, 2.5 g/L K₂HPO₄ and 5 g/L NaCl), at 26° C., with shaking at 190 rpm for 2 days. This insecticidal activity exhibited heat and protease sensitivity indicating a proteinaceous nature.

[0428] Cell pellets of strain SS473A12 were lysed at ˜30,000 psi (Constant Systems Ltd. Low March, Daventry Northants, United Kingdom) after re-suspension in 25 mM acetate, pH 5, with Protease Inhibitor Cocktail Set V, EDTA-Free (Calbiochem/EMD Millipore, Darmstadt, Germany). The crude lysate was cleared by centrifugation, readjusted to pH 5 and loaded onto a tandem of two 1 mL HiTrap™ SP-HP (GE Healthcare, Piscataway, N.J.) columns equilibrated in 25 mM acetate, pH 5. Bound proteins were eluted with a gradient of 0 to 350 mM NaCl over 20 column volumes (CV). Individual eluting fractions were inactive against WCRW but a combination of the weakly active unbound proteins with fractions eluting between a conductivity of 19 to 26 mSi resulted in strongly active pools suggesting that a two-component protein is responsible for WCRW activity. The eluted fraction pool from the HiTrap™ SP-HP columns containing active components was concentrated on 10 kDa molecular weight cutoff centrifugal concentrators (Sartorius Stedim, Goettingen, Germany) and then loaded onto a Superdex™ 75 (GE Healthcare) column that was equilibrated in 25 mM Na-Acetate, pH 5, 100 mM NaCl. Eluted fractions were inactive when assayed directly but were insecticidal when combined with the proteins that were not bound in the previous step by the SP columns. SDS-PAGE analysis of fractions indicated that WCRW activity coincided with two bands after staining with InstantBlue™ (Expedeon Ltd., San Diego, Calif.). The approximately 19 and 60 kDa protein bands were excised, digested with trypsin and analyzed by nano-liquid chromatography/electrospray tandem mass spectrometry (nano-LC/ESI-MS/MS) as described in Example 1. Protein identification was done by searches in various databases, including the genomic sequence of SS232H12 which was generated as described in Example 3. This identified the IPD095-1Aa polypeptide (SEQ ID NO: 27) and IPD095-2Aa polypeptide (SEQ ID NO: 28) which are encoded by the polynucleotides of SEQ ID NO: 562 and SEQ ID NO: 563, respectively. The genes encoding IPD095-1Aa and IPD095-2Aa were in a single operon. Recombinant co-expression of IPD095-1Aa (SEQ ID NO: 562) and IPD095-2Aa (SEQ ID NO: 563) in E. coli confirmed insecticidal activity against WCRW of the polypeptides IPD095-1Aa (SEQ ID NO: 27) and IPD095-2Aa (SEQ ID NO: 28). At the concentrations tested neither IPD095-1Aa (SEQ ID NO: 27) nor IPD095-2Aa (SEQ ID NO: 28) alone showed insecticidal activity against WCRW.

### Isolation and Identification of IPD097Aa and IPD099-1Aa, IPD099-2Aa, and IPD099-3Aa

[0429] Insecticidal activity against WCRW (Diabrotica virgifera virgifera) was observed from cleared cell lysates of Haemophilus piscium Strain JH58776-1 grown in 2× YT (yeast extract 10 g/L, pancreatic digest of casein 16 g/L, sodium chloride 5 g/L) at 28° C. while shaking at 200 rpm for 1 day. This insecticidal activity exhibited heat and protease sensitivity indicating a proteinaceous nature.

[0430] Cell pellets of strain JH58776-1 were lysed at ˜30,000 psi (Constant Systems Ltd. Low March, Daventry Northants, United Kingdom) after re-suspension in 25 mM Tris, pH 8, with “Complete, EDTA-free” protease inhibitor cocktail (Roche, Indianapolis, Ind.). The crude lysate was cleared by centrifugation at 30,000 g for 40 min and then brought to 30% ammonium sulfate saturation by slow addition of 100% saturated ammonium sulfate. After stirring for 1 hr., the solution was centrifuged at 30,000 g for 15 min. The supernatant was then brought to 70% saturation by addition of 100% saturated ammonium sulfate. This solution was stirred for 1 hr. and then centrifuged at 25,000 g for 15 min. The pellet was suspended in 20 mM Tris pH 8.0 and then adjusted to ˜1 M ammonium sulfate by addition of 2 M ammonium sulfate, 20 mM Tris, pH 8.0. The suspended extract was centrifuged at 30,000 g for 30 min and the supernatant loaded onto a 20 mL Phenyl-5PW (Tosoh Bioscience, South San Francisco, Calif.) column that was equilibrated in 20 mM Tris, pH 8.0 with 1 M ammonium sulfate. After elution of unbound proteins, a 5 CV linear gradient to 20 mM Tris, pH 8.0, 0% ammonium sulfate was applied. Eluted WCRW active fractions were pooled and concentrated using 10 kDa molecular weight cutoff centrifugal concentrators (Sartorius Stedim, Goettingen, Germany). The concentrated pool was desalted using a 26/10 G25 column (GE Healthcare) equilibrated in 20 mM Tris, pH 8.0 and then loaded onto an 8 mL GigaCap™ Q column (Tosoh Bioscience, King of Prussia, Pa.) equilibrated 20 mM Tris, pH 8.0. The column was washed with 3 CV, and then a 7.5 CV gradient to 20 mM Tris, pH 8, 0.4 M NaCl was applied. Eluted WCRW active fractions were pooled, concentrated and desalted using a 5 mL Hi-Trap™ (GE Healthcare) desalting column equilibrated in 25 mM Bis-Tris/iminodiacetic acid, pH 7.0. The desalted sample was loaded onto a 4 mL Mono P™ chromatofocusing column (GE Healthcare) equilibrated in 25 mM Bis-Tris/iminodiacetic acid, pH 7.0 and washed with 2 CV. The buffer was then switched to 1/10× Polybuffer 7-4 (GE Healthcare)/iminodiacetic acid, pH 4.0. Eluate fractions were assayed for WCRW activity and subjected to SDS PAGE analysis and staining with GelCode Blue® stain reagent (Thermo Scientific, Rockford, Ill.).

[0431] Two major zones of WCRW activity eluted from the chromatofocusing column. The first zone of WCRW activity eluted early in the pH gradient with fractions D5 and D6 coinciding with a single stained band on a SDS-PAGE gel. The approximately 16 kDa protein band was excised, digested with trypsin and analyzed by nano-LC/ESI-MS/MS as described in Example 1. Searches were conducted against various databases including the genomic sequence of JH58776-1. This identified the IPD097Aa polypeptide (SEQ ID NO: 121) which is encoded by the polynucleotides of SEQ ID NO: 590. Recombinant expression of IPD097Aa (SEQ ID NO: 590) in E. coli confirmed insecticidal activity of the polypeptide IPD097Aa (SEQ ID NO: 121). The second zone of WCRW activity eluted later in the pH gradient with fractions E5 to E7 coinciding with a band on a SDS-PAGE gel after staining with Blue® stain reagent (Thermo Fisher Scientific®). The approximately 38 kDa protein band was excised, digested with trypsin and analyzed by nano-LC/ESI-MS/MS as described in Example 1. Searches were conducted against various databases including the genomic sequence of JH58776-1. Edman sequencing allowed for identification of the N-terminal of this protein. This identified the IPD099-2Aa polypeptide (SEQ ID NO: 137) which is encoded by the polynucleotide of SEQ ID NO: 592. Recombinant expression of IPD099-2Aa (SEQ ID NO: 592) in E. coli confirmed the insecticidal activity against WCRW of the IPD099-2Aa polypeptide (SEQ ID NO: 137). Analysis of the genomic sequence of JH58776-1 indicated that the IPD099-2Aa gene was part of an operon that encodes two additional proteins, IPD099-1Aa (SEQ ID NO: 136) encoded by the polynucleotides of SEQ ID NO: 591 and IPD099-3Aa (SEQ ID NO: 138) encoded by the polynucleotides of SEQ ID NO: 593. Analysis of eluted chromatofocusing column fractions by nano-LC/ESI-MS/MS indicated that the IPD099-1Aa (SEQ ID NO: 136) and IPD099-3Aa (SEQ ID NO: 138) polypeptides eluted in fractions F10 to F1. A pool of fractions containing the IPD099-1Aa polypeptide (SEQ ID NO: 136), IPD099-2Aa polypeptide (SEQ ID NO: 137) and IPD099-3Aa polypeptide (SEQ ID NO: 138) was active at a concentration where the IPD099-2Aa polypeptide (SEQ ID NO: 137) alone was inactive. Based on these sequences PCR primers were designed and used to amplify the IPD099-1/2/3Aa operon as well as the individual IPD099-1Aa (SEQ ID NO: 136), IPD099-2Aa (SEQ ID NO: 137) and IPD099-3Aa (SEQ ID NO: 138) genes from genomic DNA prepared from the JH58776-1 bacterial cells.

[0432] The IPD099-1/2/3Aa operon as well as the individual component genes were cloned for expression of N-terminally 6× His tagged using pET14a or untagged proteins using pET-24a (No tag) via seamless cloning and transformed into BL21-Gold E. coli cells. The untagged IPD099-1/2/3Aa operon construct resulted in soluble expression of the three proteins and activity against WCRW when added to artificial diet. The cleared lysate of cells expressing untagged IPD099-2Aa polypeptide (SEQ ID NO: 137) alone resulted in severe stunting of WCRW when added to diet at 45 μg/cm2. A mixture of cleared lysates of cells expressing the IPD099-1Aa polypeptide (SEQ ID NO: 136), IPD099-2Aa polypeptide (SEQ ID NO: 137) and IPD099-3Aa polypeptide (SEQ ID NO: 138), each individually as untagged protein resulted in strong activity against WCRW. Table 3 shows average WCRW activity scores (n=4) resulting from assaying various combinations of purified N-6× His tagged IPD099-2Aa polypeptide (SEQ ID NO: 137) with purified tagged IPD099-1Aa polypeptide (SEQ ID NO: 136) and IPD099-3Aa polypeptide (SEQ ID NO: 138). While the IPD099-2Aa polypeptide (SEQ ID NO: 137) alone lost activity after 2 or more-fold dilution of a dose of 30 μg/cm2, stunting of WCRW was observed with an assay mixture containing 3.8, 1.9, and 4.7 μg/cm2 of the IPD099-1Aa polypeptide (SEQ ID NO: 136), IPD099-2Aa polypeptide (SEQ ID NO: 137), and IPD099-3Aa polypeptide (SEQ ID NO: 138), respectively. Furthermore, adding 75 pg/cm2 of the IPD099-3Aa polypeptide (SEQ ID NO: 138) to 60 μg/cm2 of the IPD099-1Aa polypeptide (SEQ ID NO: 136) resulted in no activity against WCRW and adding 75 μg/cm2 of the IPD099-3Aa polypeptide (SEQ ID NO: 138) to 30 μg/cm2 of the IPD099-2Aa polypeptide (SEQ ID NO: 137) didn't result in increased activity against WCRW compared to IPD099-2Aa (SEQ ID NO: 137) alone. A mixture of 60 μg/cm2 of the IPD099-1Aa polypeptide (SEQ ID NO: 136) with 30 ∞g/cm2 of the IPD099-2Aa polypeptide (SEQ ID NO: 137) resulted in severe stunting and stunting could still be observed with a 2-fold diluted mixture of these.

TABLE 3

| | Dose of N-6xHis-tagged IPD099 component in | | | | | | | | |
|---|---|---|---|---|---|---|---|---|---|
| | assay mixture (μg/cm²) | | | | | | | | |
| | IPD099-1Aa | IPD099-2Aa | IPD099-3Aa | | | | | | |
| | SEQ ID NO: | SEQ ID NO: | SEQ ID NO: | Fold-dilution of assay mixture | | | | | |
| Sample ID | 136 | 137 | 138 | 1 | 2 | 4 | 8 | 16 | 32 |
| IPD099-2 | — | 30 | — | 1 | 0.5 | 0 | 0 | 0 | 0 |
| IPD099-1-2 | 60 | 30 | — | 2 | 1.25 | 0 | 0 | 0 | 0 |
| IPD099-2-3 | — | 30 | 75 | 0.25 | 0 | 0 | 0 | 0 | 0 |
| IPD099-1-3 | 60 | — | 75 | 0 | 0 | 0 | 0 | 0 | 0 |
| IPD099-1-2-3 | 60 | 30 | 75 | 3 | 2.75 | 2.5 | 1.5 | 1 | 0 |

### Isolation and Identification of IPD100Aa-1/2

[0433] Insecticidal activity against WCRW (Diabrotica virgifera virgifera) was observed from cleared cell lysates of strain JH55673-1 (Pseudomonas gessardii) grown in TSB (Tryptic Soy Broth) medium (17 g/L tryptone, 3 g/L Soytone, 2.5 g/L dextrose, 2.5 g/L K₂HPO₄ and 5 g/L NaCl), at 28° C., while shaking at 160 RPM, 24 hours. This insecticidal activity exhibited heat and protease sensitivity indicating a proteinaceous nature.

[0434] Cell pellets of strain JH55673-1 were suspended in 20 mM Tris, pH 8.0+1:100 Halt™ proteinase inhibitor cocktail and lysed at 30,000 psi (Constant Systems Ltd. Low March, Daventry Northants, United Kingdom). Lysed extract was then centrifuged at 30,000 g for 45 min. The supernatant was brought to 60% ammonium sulfate saturation by dropwise addition of 100% saturated ammonium sulfate while stirring in a cold room overnight. The extract was centrifuged at 30,000 g for 20 minutes and the supernatant was discarded. The pellet portion was resuspended in 20 mM Tris, pH 8.0 and then adjusted to 1 M ammonium sulfate by dropwise addition of 2 M ammonium sulfate, 20 mM Tris, pH 8.0. After clarification, the supernatant was loaded onto a 20 mL TSKgel ether-5PW column (Tosoh Bioscience) equilibrated in 20 mM Tris, pH 8.0, 1 M ammonium sulfate. The column was washed with 3 CV, and then a 7.5 CV gradient to 20 mM Tris, pH 8.0 was applied. Eluted WCRW-active fractions were pooled and concentrated using 5 kDa centrifugal concentrators (Sartorius Stedim, Goettingen, Germany) and then desalted into 20 mM Tris, pH 8.0 using a 26/10 G25 desalting column (GE Healthcare). The desalted fraction pool was loaded onto an 8 mL SuperQ™-5PW column (Tosoh Bioscience, King of Prussia, Pa.). The column was washed with 4 CV, and then a 20 CV gradient was started to 20 mM Tris, pH 8, 0.3 M NaCl. WCRW-active fractions from the anion exchange column were pooled, concentrated and loaded onto a tandem set of two 10×300 mm Superdex™ 75 (GE Healthcare) size exclusion chromatography columns equilibrated in PBS buffer. SDS-PAGE analysis indicated that eluted WCRW activity coincided with two bands after staining with GelCode Blue® stain reagent (Thermo Fisher Scientific®). The approximately 17 and 57 kDa protein bands were excised, digested with trypsin and analyzed by nano-liquid chromatography/electrospray tandem mass spectrometry (nano-LC/ESI-MS/MS) as described in Example 1. Protein identification was done by searches in various databases, including the genomic sequence of JH55673-1 which was generated as described in Example 3. This identified the IPD100-1Aa polypeptide (SEQ ID NO: 332) and IPD100-2Aa polypeptide (SEQ ID NO: 333) which are encoded by the polynucleotides of SEQ ID NO: 611 and SEQ ID NO: 612, respectively. The genes encoding IPD100-1Aa (SEQ ID NO: 611) and IPD100-2Aa (SEQ ID NO: 612 were in a single operon. Recombinant co-expression of IPD100-1Aa (SEQ ID NO: 611) and IPD100-2Aa (SEQ ID NO: 612) in E. coli confirmed insecticidal activity of the polypeptides IPD100-1Aa (SEQ ID NO: 332) and IPD100-2Aa (SEQ ID NO: 333). At the concentrations tested neither IPD100-1Aa (SEQ ID NO: 611) nor IPD100-2Aa (SEQ ID NO: 612) alone showed insecticidal activity against WCRW.

### Isolation and Identification of IPD105Aa

[0435] Insecticidal activity against WCRW (Diabrotica virgifera virgifera) was observed from cleared cell lysates of strain JH90961-1 (Chromobacterium aquaticum) grown in 2× YT medium (yeast extract 10 g/L, pancreatic digest of casein 16 g/L, sodium chloride 5 g/L), at 28° C., while shaking at 200 RPM for 1 day. This insecticidal activity exhibited heat and protease sensitivity indicating a proteinaceous nature.

[0436] Cell pellets of strain JH90961-1 (Chromobacterium aquaticum) were suspended in PBS, centrifuged at 30,000 g for 30 min. The supernatant was discarded, the cell pellet frozen and then thawed before resuspending in 20 mM Tris, pH 9 plus “Complete, EDTA-free” protease inhibitor cocktail (Roche, Indianapolis, Ind.), and lysed at 30,000 psi (Constant Systems Ltd. Low March, Daventry Northants, United Kingdom). Lysed extract was then centrifuged at 30,000 g for 30 min. The supernatant was filtered and then diluted 1:1 with 20 mM Tris, pH 9 and loaded onto a 10 mL Capto™ Q column (GE Healthcare) equilibrated in 20 mM Tris, pH 9. After elution of unbound proteins 20 mM Tris, 0.6 M NaCl, pH 9 was used to elute WCRW-active proteins. An aliquot of the Capto™ Q eluate was desalted into 25 mM BisTris, pH 7.4 and loaded onto a 4 mL Mono P™ (GE Healthcare) chromatofocusing column with a 100% B isocratic gradient (Buffer B: Polybuffer 74, pH 4.4—diluted 1:10 with H₂O. WCRW-active fractions were pooled and desalted into 20 mM Tris, pH 8 and loaded onto a 1 mL Mono Q™ (GE Healthcare) anion exchange column over a 30 CV gradient to 20 mM Tris+0.5 M NaCl, pH 8). WCRW-activity was observed with fractions eluting at a conductivity of 9.9-14.9 mS/cm. SDS-PAGE analysis indicated that eluted WCRW activity coincided with a band after staining with GelCode Blue® stain reagent (Thermo Fisher Scientific®). The approximately 19 kDa protein band were excised, digested with trypsin and analyzed by nano-liquid chromatography/electrospray tandem mass spectrometry (nano-LC/ESI-MS/MS) as described in Example 1. Protein identification was done by searches in various databases, including the genomic sequence of JH90961-1 which was generated as described in Example 3. This identified the IPD105Aa polypeptide (SEQ ID NO: 350) which is encoded by the polynucleotide of SEQ ID NO: 614. Recombinant expression of IPD105Aa (SEQ ID NO: 614) in E. coli confirmed insecticidal activity of the polypeptide IPD105Aa (SEQ ID NO: 350).

### Isolation and Identification of IPD106Aa-1/2

[0437] Insecticidal activity against WCRW (Diabrotica virgifera virgifera) was observed from cleared cell lysates of strain JH48820-1 (Chitinophaga pinensis) grown 2× YT medium (yeast extract 10 g/L, pancreatic digest of casein 16 g/L, sodium chloride 5 g/L), at 28° C., while shaking at 200 RPM for 1 day. This insecticidal activity exhibited heat and protease sensitivity indicating a proteinaceous nature.

[0438] Cell pellets of strain JH48820-1 (Chitinophaga pinensis) were suspended in PBS, centrifuged at 30,000 g for 30 min. The supernatant was discarded and the cell pellet frozen and then thawed before resuspending in 20 mM Tris, pH 8 plus “Complete, EDTA-free” protease inhibitor cocktail (Roche, Indianapolis, Ind.), and lysed at 30,000 psi (Constant Systems Ltd. Low March, Daventry Northants, United Kingdom). Lysed extract was then centrifuged at 30,000 g for 30 min. The supernatant was filtered and then 0.5 M Na-Formate, pH 4 was added (1:10) to a final conc. of 50 mM, and 1% formic acid added to reduce the pH to pH 4. This was rocked in a cold room and clarified by centrifugation before diluting the supernatant 1:1 with 50 mM Na-Formate, pH 4 and loading this onto a 1 mL CaptoTMS (GE Healthcare) cation exchange chromatography column. After elution of unbound proteins 50 mM Na-Formate, pH 4 with 0.3 M NaCl was used to elute WCRW-active proteins. The Capto™S eluate was then concentrated with 10 kDa MWCO centrifugal concentrators (Sartorius Stedim, Goettingen, Germany) before loading onto a tandem of two Superdex™ 200 (GE Healthcare) size exclusion chromatography columns equilibrated in 100 mM ammonium bicarbonate. WCRW active fractions were pooled and desalted into 20 mM Tris, pH 8.7 and loaded onto a 1 mL Mono QTM (GE Healthcare) anion exchange chromatography column and a 30 CV gradient to 20 mM Tris+0.35 M NaCl, pH 8.7 was applied. Severe WCRW stunting activity was observed in fractions eluting at a conductivity of 5.6-8.5 mS/cm. SDS-PAGE analysis indicated that eluted WCRW activity coincided with two bands after staining with GelCode Blue® stain reagent (Thermo Fisher Scientific®). The approximately 76 and 45 kDa protein bands were excised, digested with trypsin and analyzed by nano-liquid chromatography/electrospray tandem mass spectrometry (nano-LC/ESI-MS/MS) as described in Example 1. Protein identification was done by searches in various databases, including the genomic sequence of JH48820-1 which was generated as described in Example 3. This identified the IPD106-1Aa polypeptide (SEQ ID NO: 366) and IPD106-2Aa polypeptide (SEQ ID NO: 367) which are encoded by the polynucleotides of SEQ ID NO: 617 and SEQ ID NO: 618, respectively. The genes encoding IPD106-1Aa and IPD106-2Aa were in a single operon. Recombinant expression of IPD106-1Aa (SEQ ID NO: 617) and IPD106-2Aa (SEQ ID NO: 618) in E. coli confirmed insecticidal activity of the polypeptides IPD1061Aa (SEQ ID NO: 366) and IPD106-2Aa (SEQ ID NO: 367). At the concentrations tested neither the IPD100-1Aa (SEQ ID NO: 366) nor IPD100-2Aa (SEQ ID NO: 367) polypeptides alone showed insecticidal activity against WCRW.

### Isolation and Identification of IPD107Aa

[0439] JH60888-1 (Pseudomonas brassicacearum) was grown in ISP-2 Medium (Yeast Extract—4 g/L, Malt Extract—10 g/L, Dextrose—4 g/L) at 26° C. while shaking at 250 rpm for 1 day. This insecticidal activity exhibited heat and protease sensitivity indicating a proteinaceous nature.

[0440] Cell pellets of JH60888-1 were suspended in B-PER II Bacterial Protein Extraction Reagent (Thermo Pierce) diluted to ¼× strength in 20 mM Tris-HCl buffer, pH 9.0 (Buffer A) containing protease inhibitor cocktail V from CalBiochem, Ready-Lyse™ lysozyme from Epicentre and OmniCleave™ endonuclease from Epicentre (Madison, Wis.). The cell suspension was incubated at 30° C., 250 rpm for 1 hour. The crude lysate was cleared by centrifugation at 20,000 g for 10 min and adjusted to pH 8.7 with 1 N NaOH. This material was loaded onto an anion exchange column packed with Q Sepharose™ HP media (GE Healthcare) equilibrated in Buffer A. Bound protein was eluted with a linear gradient to 0.5 M NaCl in Buffer A. Fractions were desalted and subjected for identification of insecticidal activity. Active fractions were pooled, buffer exchanged into 1M ammonium sulfate, 20 mM Tris-HCl, pH 9 (Buffer B) and applied to a hydrophobic interaction Phenyl Sepharose™ HP column (GE Healthcare) equilibrated in Buffer B. Protein was eluted with a linear gradient from 1 M to 0 M ammonium sulfate. Fractions were desalted and subjected for identification of insecticidal activity. Active fractions were pooled, desalted into 20 mM Tris-HCl pH 8, 150 mM NaCl (Buffer C) and concentrated to a final volume of 0.4 mL in a 10,000 MWCO membrane (GE Healthcare). The concentrated material was loaded onto a Superdex™ 200 10/30 size exclusion column (GE Healthcare) in Buffer C. SDS-PAGE analysis of fractions with WCRW activity showed a dominant band after staining with Coomassie® Blue dye. The approximately 11 kDa protein band was excised, digested with trypsin and analyzed by nano-liquid chromatography/electrospray tandem mass spectrometry (nano-LC/ESI-MS/MS) as described in Example 1 and subjected to N-terminal amino acid sequencing by Edman degradation. Protein identification was done by searches in various databases, including the genomic sequence of JH60888-1 which was generated as described in Example 3. This identified the IPD107Aa polypeptide (SEQ ID NO: 377) which is encoded by the polynucleotide of SEQ ID NO: 621. Recombinant expression of IPD107Aa (SEQ ID NO: 621) in E. coli confirmed insecticidal activity of the IPD107Aa polypeptide (SEQ ID NO: 377).

### Isolation and Identification of IPD111Aa

[0441] JH59138-1 (Burkholderia ambifaria) were grown in n 2× YT medium (yeast extract 10 g/L, pancreatic digest of casein 16 g/L, sodium chloride 5 g/L) at 28° C. while shaking at 160 rpm for 1 day. This insecticidal activity exhibited heat and protease sensitivity indicating a proteinaceous nature.

[0442] Cell pellets of strain JH59138-1 (Burkholderia ambifaria) were suspended in 20 mM MOPS, pH 8 buffer with “Complete, EDTA-free” protease inhibitor cocktail (Roche, Indianapolis, Ind.) and lysed at 30,000 psi (Constant Systems Ltd. Low March, Daventry Northants, United Kingdom). The crude lysate was cleared by centrifugation and filtration and adjusted to 1.0 M ammonium sulfate. The cleared lysate was loaded onto a HiTrap™ PhenylHP column (GE Healthcare, Piscataway, N.J.) equilibrated in 20 mM MOPS, pH 7.0, 1.0 M ammonium sulfate and eluted with a gradient to 0% ammonium sulfate in 20 mM MOPS, pH 7.0. Active fractions were pooled and desalted into 20 mM Tris, pH 8.0 using a HiPrep™ 26/10 desalting column (GE Healthcare) then loaded onto a Q-Sepharose™ FF column (GE Healthcare) equilibrated in 20 mM Tris, pH 8.0 and eluted with a gradient of 0 to 0.4 M NaCl over 30 column volumes. Active fractions were pooled and desalted into 25 mM Bis-Tris, pH 6.6 using a HiPrep™ 26/10 desalting column (GE Healthcare) then loaded onto a Mono P™ column (GE Healthcare) equilibrated in 25 mM Bis-Tris, pH 6.6 and eluted with 100% Polybuffer 74, pH 4.0 over 15 column volumes. Active fractions were pooled and desalted into 20 mM MES, pH 6.0 using a HiPrep™ 26/10 desalting column (GE Healthcare) then loaded onto a Mono Q™ column (GE Healthcare) equilibrated in 20 mM MES, pH 6.0 and eluted with a gradient of 0 to 0.2 M NaCl over 40 column volumes. SDS-PAGE analysis of fractions indicated that WCRW activity coincided with a prominent band after staining with GelCode™ Blue Stain Reagent (Thermo Fisher Scientific®). The approximately 36 kDa protein band was excised, digested with trypsin and analyzed by nano-liquid chromatography/electrospray tandem mass spectrometry (nano-LC/ESI-MS/MS) as described in Example 1. Protein identification was done by searches in various databases, including the genomic sequence of JH59138-1 which was generated as described in Example 3. This identified the IPD111Aa polypeptide (SEQ ID NO: 453) which is encoded by the polynucleotide of SEQ ID NO: 629. Recombinant expression of IPD111Aa (SEQ ID NO: 629) in E. coli confirmed insecticidal activity of the IPD111Aa polypeptide (SEQ ID NO: 453).

### Isolation and Identification of IPD112Aa

[0443] SSP 640H4-1 (Burkholderia ambifaria) was grown in TSB (Tryptic Soy Broth) medium (17 g/L tryptone, 3 g/L Soytone, 2.5 g/L dextrose, 2.5 g/L K₂HPO₄ and 5 g/L NaCl), at 26° C. while shaking at 210 rpm for 2 days. This insecticidal activity exhibited heat and protease sensitivity indicating a proteinaceous nature.

[0444] Cell pellets of strain SSP 640H4-1 (Burkholderia ambifaria) were suspended in 30 mM MES, pH 6 buffer, EMD Millipore protease inhibitor cocktail V (Merck KGaA, Darmstadt, Germany) at 1:100 volume, OmniCleave™ Endonuclease and ReadyLyse lysozyme (Epicenter Technologies Corporation, Chicago, Ill., USA) with “Complete, EDTA-free” protease inhibitor cocktail (Roche, Indianapolis, Ind.) and lysed at 30,000 psi (Constant Systems Ltd. Low March, Daventry Northants, United Kingdom). The crude lysate was cleared by centrifugation and filtration and brought to pH 6 by addition of 1.0 N HCl. The lysate was clarified by centrifugation at 13,800 g at 4° C. for 15 min. and then loaded onto a cation-exchange HiTrap™ S FF (GE Healthcare) column that was equilibrated in 30 mM MES, pH 6. WCRW active fractions eluted with a 30-column volume gradient to 30 mM MES pH 6, 0.6 M NaCl. Active fractions were pooled and concentrated using VivaSpin™ centrifugal concentrator with a 10 kDa molecular weight cut-off (Sartorius Stedim, Goettingen, Germany) and clarified by centrifuging at 10,000 g for 15 min. The concentrated and clarified fraction pool was then loaded onto a Superdex™ Increase 200 10/300 GL size exclusion column (GE Healthcare, Piscataway, N.J.) equilibrated in 30 mM MES with 0.15 M NaCl. SDS-PAGE analysis of fractions indicated that WCRW activity coincided with a prominent band after staining with GelCode™ Blue Stain Reagent (Thermo Fisher Scientific®). The approximately 33 kDa protein band was excised, digested with trypsin and analyzed by nano-liquid chromatography/electrospray tandem mass spectrometry (nano-LC/ESI-MS/MS) as described in Example 1. Protein identification was done by searches in various databases, including the genomic sequence of SSP 640H4-1 which was generated as described in Example 3. This identified the IPD112Aa polypeptide (SEQ ID NO: 529) which is encoded by the polynucleotide of SEQ ID NO: 635. Recombinant expression of IPD112Aa (SEQ ID NO: 635) in E. coli confirmed insecticidal activity of the IPD112Aa polypeptide (SEQ ID NO: 529).

### Example 6

### Gene Cloning and E. coil Expression

[0445] The target genes encoding the insecticidal proteins were first amplified by PCR using their genomic DNA as templates. The PCR primers were designed based on the 5′ end and 3′ end sequences of the gene either with appropriate restriction sites incorporated or with added sequences overlapping with the 5′ and 3′ ends of the linearized E. coli expression vector. With restriction enzyme digestion and ligation or homolog recombination based cloning, the PCR products were cloned into selected E. coli expression vectors, i.e. pET16b with N-His tag, pET24a with C-His tag or without tag. In case of co-expression of two proteins for a binary (IPD092-1/2, IPD095-1/2, IPD100-1/2, IPD106-1/2) and three proteins for tripartite (IPD099-1/-2/-3) toxins, their native operon sequences were also cloned into one of the E. coli vectors. The proteins were expressed in BL21(DE3), C41 or SHuffle® E. coli host cells with 1 mM IPTG overnight induction at 16° C. The recombinant protein was extracted from E. coli culture after induction. Cleared cell lysates or purified proteins were assayed on insect targets as described in Example 1.

### Example 7

### Identification of Homologs

[0446] Genomic DNA was extracted from various internal strains, the species was identified and the genome was sequenced as described in Example 3. Gene identities may be determined by conducting BLAST® (Basic Local Alignment 20 Search Tool; Altschul, et al., (1993) J. Mol. Biol. 215:403-410; see also ncbi.nlm.nih.gov/BLAST/, which can be accessed using the www prefix) searches under default parameters for similarity to sequences contained in the internal genomes and in the publicly available BLAST® “nr” database (comprising all non-redundant GenBank CDS translations, sequences derived from the 3-dimensional structure Brookhaven Protein Data Bank, the last major release of the SWISS-PROT protein sequence database, EMBL, and DDBJ databases). The polynucleotide sequences of SEQ ID NO: SEQ ID NO: 546, SEQ ID NO: 547, SEQ ID NO: 562, SEQ ID NO: 563, SEQ ID NO: 590, SEQ ID NO: 591, SEQ ID NO: 592, SEQ ID NO: 593, SEQ ID NO: 611, SEQ ID NO: 612, SEQ ID NO: 614, SEQ ID NO: 617, SEQ ID NO: 618, SEQ ID NO: 621, SEQ ID NO: 629, SEQ ID NO: 635 were analyzed.

[0447] Table 4 shows the IPD092-1Aa and IPD092-2Aa polypeptide homologs identified, sequence identification numbers for each and the bacterial isolates they were identified from.

[0448] Table 5 shows a matrix table of pair-wise identity relationships for global alignments of the IPD092Aa-1 homologs, based upon the Needleman-Wunsch algorithm, as implemented in the Needle program (EMBOSS tool suite).

[0449] Table 6 shows a matrix table of pair-wise identity relationships for global alignments of the IPD092Aa-1 homologs, based upon the Needleman-Wunsch alogorithm, as implemented in the Needle program (EMBOSS tool suite).

TABLE 4

| | Identity to | | | | | |
|---|---|---|---|---|---|---|
| | IPD092-1Aa or | | | | | |
| IPD Name | IPD092-2Aa | Source | Species | activity | protein | DNA |
| IPD092-1Aa | | internal strain - | Pseudomonas | WCRW | SEQ ID NO: 1 | SEQ ID NO: 546 |
| | | SSP473A12-1; JH17494-4; | rhodesiae | | | |
| | | JH17565-4; JH17574-1; | | | | |
| | | JH17681-1; JH17728-1; | | | | |
| | | JH17729-3; JH17730-1; | | | | |
| | | JH17731-2; JH31230-2; | | | | |
| | | SSP4608B2a; JH17728-1 | | | | |
| IPD092-2Aa | | internal strain - | Pseudomonas | WCRW | SEQ ID NO: 2 | SEQ ID NO: 547 |
| | | SSP473A12-1; JH17494-4; | rhodesiae | | | |
| | | JH17565-4; JH17494-4; | | | | |
| | | JH17565-4; JH17574-1; | | | | |
| | | JH17581-1; JH17728-1; | | | | |
| | | JH17729-3; JH17730-1; | | | | |
| | | JH17731-2; JH31230-2 | | | | |
| IPD092-1Ab | 95.7% | internal strain SSP535F3b | Pseudomonas | | SEQ ID NO: 3 | |
| | | | rhodesiae | | | |
| IPD092-2Ab | 96.9% | internal strain SSP535F3b | Pseudomonas | | SEQ ID NO: 4 | |
| | | | rhodesiae | | | |
| IPD092-1Ba | 89.1% | internal strain SSP743C9-1 | Pseudomonas frederiksbergensis | | SEQ ID NO: 5 | |
| IPD092-2Ba | 83.4% | internal strain SSP743C9-1 | Pseudomonas frederiksbergensis | | SEQ ID NO: 6 | SEQ ID NO: 548 |
| IPD092-1Bb | 81.3% | Internal strain SS43D2 | Pseudomonas frederiksbergensis | | SEQ ID NO: 7 | SEQ ID NO: 549 |
| IPD092-2Bb | 78.8% | Internal strain SS43D2 | Pseudomonas frederiksbergensis | | SEQ ID NO: 8 | |
| IPD092-1Ca | 76.4% | internal strain SSP616E3-1 | Pseudomonas | | SEQ ID NO: 9 | SEQ ID NO: 550 |
| | | | fluorescens | | | |
| IPD092-2Ca | 73.1% | internal strain SSP616E3-1 | Pseudomonas | | SEQ ID NO: 10 | SEQ ID NO: 551 |
| | | | fluorescens | | | |
| IPD092-1Cb | 71.0% | internal strain SSP642E9-1 | Pseudomonas | WCRW | SEQ ID NO: 11 | SEQ ID NO: 552 |
| | | | protegens | | | |
| IPD092-2Cb | 68.9% | internal strain SSP642E9-1 | Pseudomonas | WCRW | SEQ ID NO: 12 | SEQ ID NO: 553 |
| | | | protegens | | | |
| IPD092-1Da | 65.4% | internal strain JH67425-2 | Pseudomonas | | SEQ ID NO: 13 | SEQ ID NO: 554 |
| | | | protegens | | | |
| IPD092-2Da | 61.4% | internal strain JH67425-2 | Pseudomonas | | SEQ ID NO: 14 | SEQ ID NO: 555 |
| | | | protegens | | | |
| IPD092-1Db | 61.1% | internal strainJH94099-1 | Chromobacterium | | SEQ ID NO: 15 | |
| | | | aquaticum | | | |
| IPD092-2Db | 54.5% | internal strainJH94099-1 | Chromobacterium | | SEQ ID NO: 16 | |
| | | | aquaticum | | | |
| IPD092-1Ea | 54.7% | internal strain JH90668-1 | Chromobacterium | | SEQ ID NO: 17 | SEQ ID NO: 556 |
| | | | aquaticum | | | |
| IPD092-2Ea | 54.0% | internal strain JH90668-1 | Chromobacterium | | SEQ ID NO: 18 | SEQ ID NO: 557 |
| | | | aquaticum | | | |
| IPD092-1Eb | 50.5% | internal strain SSP283D11-1 | Burkholderia ambifaria | | SEQ ID NO: 19 | |
| IPD092-2Eb | 49.0% | internal strain SSP283D11-1 | Burkholderia ambifaria | | SEQ ID NO: 20 | |
| IPD092-2Ec | 55.8% | SSP932E4-1 | Pseudomonas mosselii | | SEQ ID NO: 21 | |
| IPD092-1Fa | 41.5% | internal strain SSP588G7-1 | Pseudomonas | | SEQ ID NO: 22 | SEQ ID NO: 558 |
| | | | putida | | | |
| IPD092-2Fa | 41.8% | internal strain SSP588G7-1 | Pseudomonas | | SEQ ID NO: 23 | SEQ ID NO: 559 |
| | | | putida | | | |
| IPD092-1Fb | 42.9% | internal strain SSP603E4-1 | Pseudomonas vranovensis | WCRW | SEQ ID NO: 24 | SEQ ID NO: 560 |
| IPD092-2Fb | 44.9% | internal strain SSP603E4-1 | Pseudomonas vranovensis | WCRW | SEQ ID NO: 25 | SEQ ID NO: 561 |
| IPD092-1Fc | 45.9% | SSP932E4-1 | Pseudomonas mosselii | | SEQ ID NO: 26 | |

TABLE 5

| | IPD092- | IPD092- | IPD092- | IPD092- | IPD092- | IPD092- |
|---|---|---|---|---|---|---|
| | 1Ab SEQ | 10a SEQ | 18b SEQ | 1Ca SEQ | 1Cb SEQ | 1Da SEQ |
| | ID NO: 3 | ID NO: 5 | ID NO: 7 | ID NO: 9 | ID NO: 11 | ID NO: 13 |
| IPD092-1Aa | 95.7 | 89.1 | 82.2 | 76.4 | 71.5 | 65.9 |
| SEQ ID NO: 1 | | | | | | |
| IPD092-1Ab | — | 88.6 | 81.8 | 75.9 | 72.4 | 65.9 |
| SEQ ID NO: 3 | | | | | | |
| IPD092-1Ba | — | — | 87.0 | 77.9 | 71.5 | 67.5 |
| SEQ ID NO: 5 | | | | | | |
| IPD092-1Bb | — | — | — | 77.9 | 69.6 | 64.8 |
| SEQ ID NO: 7 | | | | | | |
| IPD092-1Ca | — | — | — | — | 68.4 | 64.9 |
| SEQ ID NO: 9 | | | | | | |
| IPD092-1Cb | — | — | — | — | — | 71.5 |
| SEQ ID NO: 11 | | | | | | |
| IPD092-1Da | — | — | — | — | — | — |
| SEQ ID NO: 13 | | | | | | |
| IPD092-1Db | — | — | — | — | — | — |
| SEQ ID NO: 15 | | | | | | |
| IPD092-1Ea | — | — | — | — | — | — |
| SEQ ID NO: 17 | | | | | | |
| IPD092-1Eb | — | — | — | — | — | — |
| SEQ ID NO: 19 | | | | | | |
| IPD092-1Fa | — | — | — | — | — | — |
| SEQ ID NO: 22 | | | | | | |
| IPD092-1Fb | — | — | — | — | — | — |
| SEQ ID NO: 24 | | | | | | |
| | IPD092- | IPD092- | IPD092- | IPD092- | IPD092- | IPD092- |
| | 1Db SEQ | 1Ea SEQ | 1Eb SEQ | 1Fa SEQ | 1Fb SEQ | 1Fc SEQ |
| | ID NO: 15 | ID NO: 17 | ID NO: 19 | ID NO: 22 | ID NO: 24 | ID NO: 26 |
| IPD092-1Aa | 61.1 | 54.7 | 52.6 | 47.0 | 45.1 | 33.3 |
| SEQ ID NO: 1 | | | | | | |
| IPD092-1Ab | 59.4 | 53.1 | 50.2 | 45.8 | 46.0 | 33.0 |
| SEQ ID NO: 3 | | | | | | |
| IPD092-1Ba | 58.0 | 52.1 | 50.7 | 45.9 | 46.8 | 32.2 |
| SEQ ID NO: 5 | | | | | | |
| IPD092-1Bb | 57.9 | 52.1 | 48.4 | 44.9 | 45.6 | 32.9 |
| SEQ ID NO: 7 | | | | | | |
| IPD092-1Ca | 59.0 | 53.5 | 48.6 | 47.4 | 42.5 | 33.6 |
| SEQ ID NO: 9 | | | | | | |
| IPD092-1Cb | 56.5 | 54.0 | 49.1 | 45.4 | 43.4 | 35.9 |
| SEQ ID NO: 11 | | | | | | |
| IPD092-1Da | 54.0 | 52.4 | 48.4 | 46.5 | 42.3 | 35.0 |
| SEQ ID NO: 13 | | | | | | |
| IPD092-1Db | — | 79.7 | 48.4 | 41.3 | 42.6 | 33.9 |
| SEQ ID NO: 15 | | | | | | |
| IPD092-1Ea | — | — | 46.3 | 38.3 | 37.8 | 30.6 |
| SEQ ID NO: 17 | | | | | | |
| IPD092-1Eb | — | — | — | 38.5 | 40.0 | 29.3 |
| SEQ ID NO: 19 | | | | | | |
| IPD092-1Fa | — | — | — | — | 53.0 | 55.2 |
| SEQ ID NO: 22 | | | | | | |
| IPD092-1Fb | — | — | — | — | — | 41.6 |
| SEQ ID NO: 24 | | | | | | |

TABLE 6

| | IPD092- | IPD092- | IPD092- | IPD092- | IPD092- | IPD092- |
|---|---|---|---|---|---|---|
| | 2Ab SEQ | 2Ba SEQ | 2Bb SEQ | 2Ca SEQ | 2Cb SEQ | 2Da SEQ |
| | ID NO: 4 | ID NO: 6 | ID NO: 8 | ID NO: 10 | ID NO: 12 | ID NO: 14 |
| IPD092-2Aa | 96.9 | 85.6 | 80.9 | 73.1 | 69.6 | 62.4 |
| SEQ ID NO: 2 | | | | | | |
| IPD092-2Ab | — | 85.1 | 80.9 | 73.1 | 69.6 | 60.9 |
| SEQ ID NO: 4 | | | | | | |
| IPD092-2Ba | — | — | 87.6 | 71.0 | 70.6 | 61.9 |
| SEQ ID NO: 6 | | | | | | |
| IPD092-2Bb | — | — | — | 74.1 | 70.6 | 62.9 |
| SEQ ID NO: 8 | | | | | | |
| IPD092-2Ca | — | — | — | — | 66.8 | 59.9 |
| SEQ ID NO: 10 | | | | | | |
| IPD092-2Cb | — | — | — | — | — | 68.3 |
| SEQ ID NO: 12 | | | | | | |
| IPD092-2Da | — | — | — | — | — | — |
| SEQ ID NO: 14 | | | | | | |
| IPD092-2Db | — | — | — | — | — | — |
| SEQ ID NO: 16 | | | | | | |
| IPD092-2Ea | — | — | — | — | — | — |
| SEQ ID NO: 18 | | | | | | |
| IPD092-2Eb | — | — | — | — | — | — |
| SEQ ID NO: 20 | | | | | | |
| IPD092-2Ec | — | — | — | — | — | — |
| SEQ ID NO: 21 | | | | | | |
| IPD092-2Fa | — | — | — | — | — | — |
| SEQ ID NO: 23 | | | | | | |
| | IPD092- | IPD092- | IPD092- | IPD092- | IPD092- | IPD092- |
| | 2Db SEQ | 2Ea SEQ | 2Eb SEQ | 2Ec SEQ | 2Fa SEQ | 2Fb SEQ |
| | ID NO: 16 | ID NO: 18 | ID NO: 20 | ID NO: 21 | ID NO: 23 | ID NO: 25 |
| IPD092-2Aa | 55.7 | 55.2 | 49.0 | 38.3 | 41.8 | 43.7 |
| SEQ ID NO: 2 | | | | | | |
| IPD092-2Ab | 57.2 | 56.7 | 47.9 | 33.3 | 41.8 | 45.9 |
| SEQ ID NO: 4 | | | | | | |
| IPD092-2Ba | 57.5 | 57.7 | 50.3 | 34.7 | 44.0 | 42.7 |
| SEQ ID NO: 6 | | | | | | |
| IPD092-2Bb | 56.0 | 55.2 | 48.7 | 34.7 | 43.0 | 41.7 |
| SEQ ID NO: 8 | | | | | | |
| IPD092-2Ca | 53.0 | 52.5 | 46.9 | 33.9 | 41.5 | 39.2 |
| SEQ ID NO: 10 | | | | | | |
| IPD092-2Cb | 55.2 | 54.5 | 50.0 | 31.7 | 42.8 | 44.7 |
| SEQ ID NO: 12 | | | | | | |
| IPD092-2Da | 58.5 | 56.1 | 52.2 | 31.7 | 41.9 | 42.9 |
| SEQ ID NO: 14 | | | | | | |
| IPD092-2Db | — | 91.5 | 51.0 | 33.6 | 39.5 | 41.4 |
| SEQ ID NO: 16 | | | | | | |
| IPD092-2Ea | — | — | 53.7 | 31.9 | 39.1 | 38.4 |
| SEQ ID NO: 18 | | | | | | |
| IPD092-2Eb | — | — | — | 47.4 | 33.3 | 32.3 |
| SEQ ID NO: 20 | | | | | | |
| IPD092-2Ec | — | — | — | — | 57.9 | 44.6 |
| SEQ ID NO: 21 | | | | | | |
| IPD092-2Fa | — | — | — | — | — | 56.0 |
| SEQ ID NO: 23 | | | | | | |

Table 7 shows the IPD095-1Aa and IPD095-2Aa polypeptide homologs identified, sequence identification numbers for each and the bacterial isolates they were identified from.

TABLE 7

| | Identity to | | | | | |
|---|---|---|---|---|---|---|
| | IPD095- | | | | | |
| IPD Name | 1/2Aa | Source | Species | activity | Protein | DNA |
| IPD095-1Aa | | SSP232H12-1, SSP237H1d | Serratia nematodiphila | WCRW | SEQ ID NO: 27 | SEQ ID NO: 562 |
| IPD095-2Aa | | SSP232H12-1, SSP237H1d | Serratia nematodiphila | WCRW | SEQ ID NO: 28 | SEQ ID NO: 563 |
| IPD095-1Ab | 98.9% | Internal strain SSP587F12-1 | Serratia marcescens | | SEQ ID NO: 29 | SEQ ID NO: 564 |
| IPD095-1Ac | 97.7% | Internal strain JH20487-2; | Serratia marcescens | | SEQ ID NO: 30 | SEQ ID NO: 565 |
| | | JH52720-2; JH52735-2 | | | | |
| IPD095-1Ad | 97.1% | NCBI_WP_019455460; | Serratia marcescens | | SEQ ID NO: 31 | SEQ ID NO: 566 |
| | | internal - JH47141-1 (2aa); | H1q | | | |
| | | JH47215-1 (2aa) | | | | |
| IPD095-1Ae | 97% | NCBI_A0A0A5TBG6 | Serratia marcescens | | SEQ ID NO: 32 | |
| IPD095-1Af | 98% | NCBI_A0A0A5NMY4 | Serratia marcescens | | SEQ ID NO: 33 | |
| IPD095-1Ag | 98.3% | internal strain SSP639G4-2; | Serratia marcescens | | SEQ ID NO: 34 | |
| | | SSP639F11-1 | | | | |
| IPD095-1Ah | 97.1% | 4714-1 | | | SEQ ID NO: 35 | |
| IPD095-1Ai | 99.4% | WP_033650308 | | | SEQ ID NO: 36 | |
| IPD095-1Aj | 98.3% | WP_047026045 | | | SEQ ID NO: 37 | |
| IPD095-1Ak | 96.6% | A0A0A5NMY4 | | | SEQ ID NO: 38 | |
| IPD095-1Al | 97.1% | WP_055313380 | | | SEQ ID NO: 39 | |
| IPD095-1Am | 97.7% | WP_063919633 | Serratia sp. | | SEQ ID NO: 40 | |
| IPD095-1Ba | 85.1% | internal strain JH20785-4; | Serratia proteamaculans | | SEQ ID NO: 41 | SEQ ID NO: 567 |
| | | JH78168-2 (1aa); | | | | |
| IPD095-1Bb | 83.9% | internal strain JH21591-1; | Serratia liquefaciens | | SEQ ID NO: 42 | SEQ ID NO: 568 |
| | | JH21602-1 | | | | |
| IPD095-1Bc | 82.2% | internal strain SSP443E1-2; | Serratia plymuthica | | SEQ ID NO: 43 | SEQ ID NO: 569 |
| | | SSP443E10-1; JH79545-2; | | | | |
| | | JH90222-1; KL1 pooled | | | | |
| IPD095-1Bd | 83.3% | NCBI_WP_017892809 | Serratia sp. S4 | | SEQ ID NO: 44 | |
| IPD095-1Be | 82.2% | NCBI_YP_008159223 | Serratia plymuthica | | SEQ ID NO: 45 | SEQ ID NO: 570 |
| | | | S13 | | | |
| IPD095-1Bf | 84% | NCBI-WP_041418562 | Serratia proteamaculans | | SEQ ID NO: 46 | |
| IPD095-1Bg | 86% | WP_044551028 | Serratia liquefaciens | | SEQ ID NO: 47 | |
| IPD095-1Bh | 83.3% | internal pooled XM16 | | | SEQ ID NO: 48 | |
| IPD095-1Bi | 84% | internal pool HK- | | | SEQ ID NO: 49 | |
| | | 8_D1470007_NODE_3_6056 | | | | |
| IPD095-1Bj | 84.5% | JH78168-2 | | | SEQ ID NO: 50 | |
| IPD095-1Bk | 81% | KL1_pooled_NODE_1076_116 | | | SEQ ID NO: 51 | |
| IPD095-1Bl | 81.6% | WP_062870795 | | | SEQ ID NO: 52 | |
| IPD095-1Bm | 81.6% | WP_063198351 | Serratia plymuthica | | SEQ ID NO: 53 | |
| IPD095-1Ca | 79.9% | internal strain - JH19892-1 | Serratia plymuthica | | SEQ ID NO: 54 | SEQ ID NO: 571 |
| IPD095-1Cb | 79.3% | NCBI_WP_006318834 | Serratia plymuthica | | SEQ ID NO: 55 | SEQ ID NO: 572 |
| | | | PRI-2C | | | |
| IPD095-1Cc | 79% | internal pool XM4 | | | SEQ ID NO: 56 | |
| IPD095-1Cd | 79.3% | PMCJ3367H8-1 | Serratia plymuthica | | SEQ ID NO: 57 | SEQ ID NO: 573 |
| IPD095-1Ea | 52.8% | NCBI-WP_027273487.1 | Leminorella grimontii | | SEQ ID NO: 58 | SEQ ID NO: 574 |
| | | hypothetical protein | | | | |
| IPD095-2Ab | 97.9% | internal strain SSP587F12-1 | Serratia marcescens | | SEQ ID NO: 59 | SEQ ID NO: 575 |
| IPD095-2Ac | 98.9% | internal strain JH20487-2 | Serratia nematodiphil | | SEQ ID NO: 60 | SEQ ID NO: 576 |
| IPD095-2Ae | 99.3% | internal stain JH52720-2; | Serratia marcescens | | SEQ ID NO: 61 | SEQ ID NO: 577 |
| | | JH52935-2 | | | | |
| IPD095-2Af | 99.4% | NCBI_EZQ65351 | Serratia marcescens | | SEQ ID NO: 62 | SEQ ID NO: 578 |
| | | | BIDMC 81 | | | |
| IPD095-2Ag | 97% | internal - JH4714-1; | Serratia marcescens | | SEQ ID NO: 63 | |
| | | JH47215-1 | | | | |
| IPD095-2Ah | 96% | NCBI_A0A0A5LR46 | Serratia marcescens | | SEQ ID NO: 64 | |
| IPD095-2Aj | 98% | NCBI_A0A0A5VA11 | Serratia marcescens | | SEQ ID NO: 65 | |
| IPD095-2Aj | 98.9% | internal strain SSP639G4-2; | Serratia marcescens | | SEQ ID NO: 66 | |
| | | SSP639F11-1; | | | | |
| IPD095-2Ak | 97.2% | AKL43846 | Serratia marcescens | | SEQ ID NO: 67 | |
| IPD095-2Al | 98.9% | internal pooled XM13 | | | SEQ ID NO: 68 | |
| IPD095-2Am | 96.8% | WP_055316991 | Serratia marcescens | | SEQ ID NO: 69 | |
| IPD095-2An | 97.6% | WP_060439867 | Serratia marcescens | | SEQ ID NO: 70 | |
| IPD095-2Ae | 96.4% | WP_060435039 | Serratia marcescens | | SEQ ID NO: 71 | |
| IPD095-2Ap | 98.3% | WP_047026044 | | | SEQ ID NO: 72 | |
| IPD095-2Aq | 97% | WP_055313378 | | | SEQ ID NO: 73 | |
| IPD095-2Ar | 98.3% | WP_046898260 | | | SEQ ID NO: 74 | |
| IPD095-2As | 99.1% | XM28_pooled_NODE_1742_74 | | | SEQ ID NO: 75 | |
| IPD095-2At | 97.2% | WP_060418690 | | | SEQ ID NO: 76 | |
| IPD095-2Au | 97.2% | PMC3675E4-1 | Serratia marcescens | | SEQ ID NO: 77 | |
| IPD095-2Av | 98.1% | PMC3703F6-1 | Serratia ureilytica | | SEQ ID NO: 78 | |
| IPD095-2Aw | 97.2% | SAY43294 | Serratia marcescens | | SEQ ID NO: 79 | |
| IPD095-2Ca | 78.9% | NCBI_WP_019455461 | Serratia marcescens | | SEQ ID NO: 80 | SEQ ID NO: 579 |
| | | | H1q | | | |
| IPD095-2Cb | 79.8% | WP_063919534 | Serratia sp. | | SEQ ID NO: 81 | |
| IPD095-2Da | 62.1% | internal strain JH20785-4 | Serratia proteamaculans | | SEQ ID NO: 82 | SEQ ID NO: 580 |
| IPD095-2Db | 62.2% | internal strain JH21591-1; | Serratia liquefaciens | | SEQ ID NO: 83 | SEQ ID NO: 581 |
| | | JH21602-1; JH78168-2 (2aa); | | | | |
| IPD095-2Dc | 62.6% | internal strain | Serratia plymuthica | | SEQ ID NO: 84 | SEQ ID NO: 582 |
| | | SSP443E1-2 | | | | |
| IPD095-2Dd | 62.8% | internal strain SSP443E10-1; | Serratia plymuthica | | SEQ ID NO: 85 | SEQ ID NO: 583 |
| | | JH79545-2 (1aa); JH80222-1 | | | | |
| | | (1aa) | | | | |
| IPD095-2De | 63.2% | internal strain JH19892-1 | Serratia plymuthica | | SEQ ID NO: 86 | SEQ ID NO: 584 |
| IPD095-2Df | 62.4% | NCBI_WP_017892808 | | | SEQ ID NO: 87 | |
| IPD095-2Dg | 62.2% | NCBI_WP_006318833 | Serratia plymuthica | | SEQ ID NO: 88 | SEQ ID NO: 585 |
| | | | PRI-2C | | | |
| IPD095-2Dh | 63.6% | NCBI_YP_001478610 | Serratia proteamaculans 568 | | SEQ ID NO: 89 | SEQ ID NO: 586 |
| IPD095-2Di | 62.2% | NCBI_YP_0081592222 | Serratia plymuthica S13 | | SEQ ID NO: 90 | SEQ ID NO: 587 |
| IPD095-2Dj | 61.9% | NCBI_WP_006325190 | Serratia plymuthica | | SEQ ID NO: 91 | SEQ ID NO: 588 |
| | | | A30 | | | |
| IPD095-2Dk | 62.4% | NCBI_AHY07405.1 | Serratia plymuthica | | SEQ ID NO: 92 | SEQ ID NO: 589 |
| | | hypothetical protein | V4 | | | |
| IPD095-2Dl | 62% | WP_044551026 | Serratia liquefaciens | | SEQ ID NO: 93 | |
| IPD095-2Dm | 62% | internal pooled KL1 | | | SEQ ID NO: 94 | |
| IPD095-2Dn | 63% | internal pooled KL1 | | | SEQ ID NO: 95 | |
| IPD095-2Do | 63.4% | internal pooled XM8 | | | SEQ ID NO: 96 | |
| IPD095-2Dp | 61.9% | internal pooled XM16 | | | SEQ ID NO: 97 | |
| IPD095-2Dq | 61.9% | WP_062790859 | Serratia sp. | | SEQ ID NO: 98 | |
| IPD095-2Dr | 62.1% | JH78168-2 | | | SEQ ID NO: 99 | |
| IPD095-2Ds | 62.8% | JH79545-2 | | | SEQ ID NO: 100 | |
| IPD095-2Dt | 63% | WP_062871340 | | | SEQ ID NO: 101 | |
| IPD095-2Du | 63% | WP_063198354 | Serratia plymuthica | | SEQ ID NO: 102 | |
| IPD095-2Dv | 62.1% | ANK01150 | Serratia plymuthica | | SEQ ID NO: 103 | |
| IPD095-2Dw | 62.4% | WP_073439915 | Serratia plymuthica | | SEQ ID NO: 104 | |
| IPD095-2Ea | 51.5% | NCBI_WP_005186718, | | | SEQ ID NO: 105 | |
| | | WP_050008601, | | | | |
| IPD095-2Eb | 50% | NCBI-WP_035346074, | Dickeya sp. | | SEQ ID NO: 106 | |
| | | WP_051124215 | | | | |
| IPD095-2Ec | 58.1% | internal pooled XM10 | | | SEQ ID NO: 107 | |
| IPD095-2Ed | 57.6% | WP_047607950 | Rahnella aquatilis | | SEQ ID NO: 108 | |
| IPD095-2Ee | 57.2% | WP_047611350 | Rahnella aquatilis | | SEQ ID NO: 109 | |
| IPD095-2Ef | 51.2% | A0A0E8JDU8, | Yersinia intermedia | | SEQ ID NO: 110 | |
| | | WP_050882131 | | | | |
| IPD095-2Eg | 61.4% | WP_061495529 | Enterobacter sp. | | SEQ ID NO: 111 | |
| IPD095-2Eh | 51.7% | WP_042568849 | | | SEQ ID NO: 112 | |
| IPD095-2Ei | 51.5% | WP_0500088601 | | | SEQ ID NO: 113 | |
| IPD095-2Ej | 51.5% | WP_050074011 | | | SEQ ID NO: 114 | |
| IPD095-2Ek | 50% | WP_051124215 | | | SEQ ID NO: 115 | |
| IPD095-2El | 51.3% | WP_050882131 | | | SEQ ID NO: 116 | |
| IPD095-2Em | 55.3% | WP_067707065 | Erwinia sp. | | SEQ ID NO: 117 | |
| IPD095-2Fa | 47.0% | NCBI_WP_017346989 | | | SEQ ID NO: 118 | |
| IPD095-2Fb | 47.8% | XM28_pooled_NODE_127_1270 | | | SEQ ID NO: 119 | |
| IPD095-2Fc | 47.7% | A0A1C4CX92 | Enterobacter | | SEQ ID NO: 120 | |
| | | | oryzendophyticus | | | |

Table 8 shows the IPD097-1Aa polypeptide homologs identified, sequence identification numbers for each and the bacterial isolates they were identified from.

TABLE 8

| | Identity to | | | | | |
|---|---|---|---|---|---|---|
| IPD Name | IPD097Aa | Source | Species | activity | Protein | DNA |
| IPD097Aa | | internal strain JH58776-1, | Haemophilus piscium | WCRW | SEQ ID NO: 121 | SEQ ID NO: 590 |
| | | JH67351-1 (1aa differ); | | | | |
| | | JH78490-2; JH82751-1; XM5 pooled | | | | |
| IPD097Ab | 96.6% | NCBI YP_001143082.1 | Aeromonas salmonicida | | SEQ ID NO: 122 | |
| | | hypothetical protien | | | | |
| IPD097Ac | 96.9% | internal strain SSP651B-1 | Aeromonas salmonicida | | SEQ ID NO: 123 | |
| IPD097Ad | 96% | NCBI-WP_017411752 | Aeromonas salmonicida | | SEQ ID NO: 124 | |
| IPD097Ae | 98% | WP_042860997 | Aeromonas piscicola | | SEQ ID NO: 125 | |
| IPD097Af | 90.4% | WP_050718115 | Aeromonas tecta | | SEQ ID NO: 126 | |
| IPD097Ag | 99.3% | JH67351-1; PMCH4138E11-1; | | | SEQ ID NO: 127 | |
| | | PMCH4138E05-1 | | | | |
| IPD097Ah | 99.3% | XM5_pooled_NODE_966_119 | | | SEQ ID NO: 128 | |
| IPD097Ai | 99.3% | JH78147-1 | | | SEQ ID NO: 129 | |
| IPD097Aj | 95.2% | WP_058393614 | | | SEQ ID NO: 130 | |
| IPD097Ak | 95.9% | AA0W0AXB2 | | | SEQ ID NO: 131 | |
| IPD097Al | 96.2% | XM26_pooled_NODE_540_188 | | | SEQ ID NO: 132 | |
| IPD097Am | 98.6% | WP_065403351 | Aeromonas piscicola | | SEQ ID NO: 133 | |
| IPD097Ba | 82.9% | NCBI WP_005348511.1 | Aeromonas diversa | | SEQ ID NO: 134 | |
| | | hypothetical | | | | |
| | | protein | | | | |
| IPD097Ea | 56.6% | WP_066501527 | Clostridiales bacterium | | SEQ ID NO: 135 | |

[0450] Table 9 shows the IPD099-1Aa, IPD099-2Aa, and IPD099-3Aa polypeptide homologs identified, sequence identification numbers for each and the bacterial isolates they were identified from.

TABLE 9

| | Identity to | | | | | |
|---|---|---|---|---|---|---|
| | IPD099- | | | | | |
| IPD Name | 1/2/3Aa | Source | Species | activity | Protein | DNA |
| IPD099-1Aa | | internal strain JH58776-1; | Aeromonas salmonicida | WCRW | SEQ ID NO: 136 | SEQ ID |
| | | JH91676-2 | ssp. Salmonicida | | | NO: 591 |
| IPD099-2Aa | | internal strain JH28776-1, | Aeromonas salmonicida | WCRW | SEQ ID NO: 137 | SEQ ID |
| | | JH67351-1 (1aa), NCBI | ssp. Salmonicida | | | NO: 592 |
| | | KFN17897.1; JH78490-2; | | | | |
| | | WP_042869733; | | | | |
| | | WP_043556154 | | | | |
| IPD099-3Aa | | JH58776-1 | Aeromonas salmonicida | WCRW | SEQ ID NO: 138 | SEQ ID |
| | | | ssp. Salmonicida | | | NO: 593 |
| IPD099-1Ab | 98% | JH82751-1 (2aa differ) | Aeromonas salmonicida | WCRW | SEQ ID NO: 139 | SEQ ID |
| | | | | | | NO: 594 |
| IPD099-1Ac | 98% | JH67351-1 (3aa differ) | Aeromonas salmonicida | WCRW | SEQ ID NO: 140 | SEQ ID |
| | | | | | | NO: 595 |
| IPD099-1Ad | 97% | NCBI KFN17896.1 | Aeromonas salmonicida | | SEQ ID NO: 141 | |
| IPD099-1Ae | 99% | JH78490-2 | Haemophilus piscium | WCRW | SEQ ID NO: 142 | SEQ ID |
| | | | | | | NO: 596 |
| IPD099-1Af | 92% | WP_042036788 | Aeromonas popoffii | | SEQ ID NO: 143 | |
| IPD099-1Ag | 98% | internal pooled XM5 | | | SEQ ID NO: 144 | |
| IPD099-1Ah | 99% | internal pooled KL1 | | | SEQ ID NO: 145 | |
| IPD099-1Ai | 96.2% | WP_042869735 | Aeromonas piscicola | | SEQ ID NO: 146 | |
| IPD099-1Aj | 98.4% | WP_043556153 | Aeromonas bestiarum | | SEQ ID NO: 147 | |
| IPD099-1Ak | 98.4% | internal pooled XM23 | | | SEQ ID NO: 148 | |
| IPD099-1Al | 99.7% | JH91676-2 | | | SEQ ID NO: 149 | |
| IPD099-1Am | 99.2% | JH78147-1 | | | SEQ ID NO: 150 | |
| IPD099-1An | 95.9% | WP_065403857 | Aeromonas piscicola | | SEQ ID NO: 151 | |
| IPD099-1Ba | 80% | NCBI FW306009.1 | Aeromonas hydrophila | | SEQ ID NO: 152 | |
| IPD099-1Bb | 80% | NCBI WP_011706401.1 | Aeromonas hydrophila | | SEQ ID NO: 153 | |
| IPD099-1Ca | 79% | NCBI WP_017786782.1 | Aeromonas hydrophila | | SEQ ID NO: 154 | |
| IPD099-1Cb | 79% | K01-14A1-1, K01-20A3-2 | Aeromonas hydrophila | | SEQ ID NO: 155 | |
| IPD099-1Cc | 79% | JH58748-2; XM5 pooled; | Aeromonas hydrophila | WcRw | SEQ ID NO: 156 | SEQ ID |
| | | NCBI-AJQ55024 | | | | NO: 597 |
| IPD099-1Cd | 79% | JH67338-1 | Aeromonas hydrophila | WCRW | SEQ ID NO: 157 | SEQ ID |
| | | | | | | NO: 598 |
| IPD099-1Ce | 79% | JH71362-2, JH70211-1 | Aeromonas hydrophila | WCRW | SEQ ID NO: 158 | SEQ ID |
| | | | | | | NO: 599 |
| IPD099-1Cf | 79% | NCBI WP_019840111.1 | Aeromonas sp. MDS6 | | SEQ ID NO: 159 | |
| IPD099-1Cg | 79% | NCBI WP_WP_017764245.1 | Aeromonas hydrophila | | SEQ ID NO: 160 | |
| IPD099-1Ch | 79% | NCBI WP_024941132.1 | Aeromonas hydrophila | | SEQ ID NO: 161 | |
| IPD099-1Ci | 79% | NCBI WP_010633676.1 | Aeromonas dhakensis | | SEQ ID NO: 162 | |
| IPD099-1Cj | 79% | NCBI WP_017778854.1 | Aeromonas hydrophila | | SEQ ID NO: 163 | |
| IPD099-1Ck | 79% | NCBI WP_017782950.1 | Aeromonas hydrophila | | SEQ ID NO: 164 | |
| IPD099-1Cl | 79% | NCBI WP_017408110.1 | Aeromonas hydrophila | | SEQ ID NO: 165 | |
| IPD099-1Cm | 79% | NCBI WP_005302106.1 | Aeromonas | | SEQ ID NO: 166 | |
| IPD099-1Cn | 79% | NCBI WP_006302106.1 | Aeromonas | | SEQ ID NO: 167 | |
| IPD099-1Co | 79% | NCBI KER63311.1 | Aeromonas hydrophila | | SEQ ID NO: 168 | |
| IPD099-1Cp | 78% | NCBI WP_029300415.1 | Aeromonas hydrophila | | SEQ ID NO: 169 | |
| IPD099-1Cq | 78% | NCBI EXH80101.1 | Aeromonas hydrophila | | SEQ ID NO: 170 | |
| IPD099-1Cr | 78% | NCBI WP_029302783.1 | Aeromonas hydrophila | | SEQ ID NO: 171 | |
| IPD099-1Cs | 77% | NCBI WP_016351060.1 | Aeromonas hydrophila | | SEQ ID NO: 172 | |
| IPD099-1Ct | 79% | WP_039213462; internal | Aeromonas hydrophila | | SEQ ID NO: 173 | |
| | | pooled XM1 | | | | |
| IPD099-1Cu | 79% | NCBI - A0A0A6C9G1 | Aeromonas hydrophila | | SEQ ID NO: 174 | |
| IPD099-1Cv | 79% | WP_042007673 | Aeromonas dhakensis | | SEQ ID NO: 175 | |
| IPD099-1Cw | 79% | NCBI - A0A0A5LAG3 | Aeromonas hydrophila | | SEQ ID NO: 176 | |
| IPD099-1Cx | 79% | JH78710-1 | Aeromonas hydrophila | | SEQ ID NO: 177 | |
| IPD099-1Cy | 79% | JH99577-2; | Aeromonas hydrophila | | SEQ ID NO: 178 | |
| | | WP_049047798 | | | | |
| IPD099-1Cz | 79% | internal pooled XM1 | | | SEQ ID NO: 179 | |
| IPD099-1Caa | 79% | internal pooled KL1 | | | SEQ ID NO: 180 | |
| IPD099-1Cab | 79% | WP_043169496 | Aeromonas | | SEQ ID NO: 181 | |
| IPD099-1Cac | 78.8% | WP_045527022; | Aeromonas hydrophila | | SEQ ID NO: 182 | |
| | | WP_045789543 | | | | |
| IPD099-1Cad | 79% | internal pooled XM24 | | | SEQ ID NO: 183 | |
| IPD099-1Cae | 78.8% | WP_0603900299 | Aeromonas hydrophila | | SEQ ID NO: 184 | |
| IPD099-1Caf | 79% | XM27_pooled_NODE_19_3967 | | | SEQ ID NO: 185 | |
| IPD099-1Cag | 78.5% | XM26_pooled_NODE_315_83 | | | SEQ ID NO: 186 | |
| IPD099-1Cah | 78.8% | XM31_pooled_NODE_9686_1 | | | SEQ ID NO: 187 | |
| IPD099-1Cai | 79.3% | XM5_pooled_NODE_929_130 | | | SEQ ID NO: 188 | |
| IPD099-1Caj | 78.8% | AJQ55024 | | | SEQ ID NO: 189 | |
| IPD099-1Cak | 79% | WP_042064547 | | | SEQ ID NO: 190 | |
| IPD099-1Cal | 78.8% | WP_054544695 | | | SEQ ID NO: 191 | |
| IPD099-1Cam | 79.6% | partial_XM1_pooled_NODE_1535_6 | | | SEQ ID NO: 192 | |
| IPD099-1Can | 79.3% | WP_049047798 | | | SEQ ID NO: 193 | |
| IPD099-1Cao | 79% | WP_045789543 | | | SEQ ID NO: 194 | |
| IPD099-1Cap | 78.5% | XM30_pooled_NODE_8056_21 | | | SEQ ID NO: 195 | |
| IPD099-1Caq | 75.3% | JH77890-1 | | | SEQ ID NO: 196 | |
| IPD099-1Car | 79.3% | ANT67622 | Aeromonas hydrophila | | SEQ ID NO: 197 | |
| IPD099-1Cas | 79% | WP_065018003 | Aeromonas dhakensis | | SEQ ID NO: 198 | |
| IPD099-1Cat | 79% | PMCJ4115H2-1 | Aeromonas hydrophila | | SEQ ID NO: 199 | SEQ ID |
| | | | | | | NO: 600 |
| IPD099-1Cau | 78.5% | WP_073350653 | Aeromonas aquatica | | SEQ ID NO: 200 | |
| IPD099-1Cav | 78.5% | WP_076360968 | Aeromonas | | SEQ ID NO: 201 | |
| IPD099-1Ea | 50% | WP_043629758, | Chromobacterium piscinae | | SEQ ID NO: 202 | |
| | | WP_052247043 | | | | |
| IPD099-1Eb | 50% | WP_052247043 | | | SEQ ID NO: 203 | |
| IPD099-1Fa | 47% | NCBI EXIJ77038.1 | Erwinia amylovora | | SEQ ID NO: 204 | |
| IPD099-1Fb | 44% | internal strain JH78168-2; | Serratia liquefaciens | | SEQ ID NO: 205 | SEQ ID |
| | | JH20785-4 | | | | NO: 601 |
| IPD099-1Fc | 43.6% | WP_006320606 | Serratia plymuthica | | SEQ ID NO: 206 | |
| IPD099-1Fd | 45.8% | WP_044553510 | Serratia liquefaciens | | SEQ ID NO: 207 | |
| IPD099-1Fe | 43.9% | PMC3546H11-1 | Serratia marcescens | | SEQ ID NO: 208 | SEQ ID |
| | | | | | | NO: 602 |
| IPD099-1Ff | 45.3% | A0A0X2PAR3 | Serratia | | SEQ ID NO: 209 | |
| IPD099-1Fg | 44.2% | PMC3677F8-1 | Serratia ureilytica | | SEQ ID NO: 210 | |
| IPD099-1Fh | 41.6% | WP_069590127 | Salinivibrio sp. | | SEQ ID NO: 211 | |
| IPD099-1Fi | 45.5% | WP_073534092 | Serratia marcescens | | SEQ ID NO: 212 | |
| IPD099-1Fj | 43.9% | WP_074055057 | Serratia marcescens | | SEQ ID NO: 213 | |
| IPD099-1Ga | 34.6% | WP_063524174 | Vibrio sp. | | SEQ ID NO: 214 | |
| IPD099-1Gb | 35.4% | IB2016_0659 | | | SEQ ID NO: 215 | |
| IPD099-2Ab | 99% | JH82751-1 (1aa differ) | Aeromonas salmonicida | | SEQ ID NO: 216 | |
| IPD099-2Ac | 90% | JH71362-2, JH70211-1, | Aeromonas hydrophila, | WCRW | SEQ ID NO: 217 | |
| | | JH58748-2, JH77890-1, | Aeromonas salmonicida | | | |
| | | JH67338-1 (1aa), | | | | |
| | | JH77959-1 (1aa); internal | | | | |
| | | pooled KL1; NCBI | | | | |
| | | WP_005302109.1; | | | | |
| | | NCBI_WP_041216094 | | | | |
| | | (1aa) WP_045789542; | | | | |
| | | WP_049047797 | | | | |
| IPD099-2Ad | 90% | K01-14A1-1, K01-20A3-2, | Aeromonas hydrophila, | | SEQ ID NO: 218 | |
| | | NCBI WP_010633675.1, | Aeromonas dhakensis | | | |
| | | WP_017778853 (2aa); | | | | |
| | | WP_005302109 (1aa); | | | | |
| | | WP_042040644 (2aa); | | | | |
| | | internal pooled XM1 | | | | |
| IPD099-2Ae | 90% | NCBI WP_011706402.1, | Aeromonas hydrophila | | SEQ ID NO: 219 | |
| | | FW306009.1; AGM44514 | | | | |
| | | (1aa) | | | | |
| IPD099-2Af | 90% | NCBI EZH80102.1 | Aeromonas hydrophila | | SEQ ID NO: 220 | |
| IPD099-2Ag | 96% | | Aeromonas popoffii | | SEQ ID NO: 221 | |
| IPD099-2Ah | 99.7% | JH67351-1 | | | SEQ ID NO: 222 | |
| IPD099-2Ai | 99.7% | WP_042869733 | | | SEQ ID NO: 223 | |
| IPD099-2Aj | 99.7% | WP_043556154 | | | SEQ ID NO: 224 | |
| IPD099-2Ak | 99.7% | JH78147-1 | | | SEQ ID NO: 225 | |
| IPD099-2Al | 90% | WP_005302109 | | | SEQ ID NO: 226 | |
| IPD099-2Am | 93.9% | partial_XM1_pooled_NODE_6114_1 | | | SEQ ID NO: 227 | |
| IPD099-2An | 99.4% | WP_065403858 | Aeromonas piscicola | | SEQ ID NO: 228 | |
| IPD099-2Ao | 90.3% | WP_073350654 | Aeromonas aquatica | | SEQ ID NO: 229 | |
| IPD099-2Ba | 89.7% | JH67338-1 | | | SEQ ID NO: 230 | SEQ ID |
| | | | | | | NO: 603 |
| IPD099-2Bb | 89.7% | WP_041216094 | | | SEQ ID NO: 231 | |
| IPD099-2Bc | 89.4% | KL1_pooled_NODE_194_599 | | | SEQ ID NO: 232 | |
| IPD099-2Bd | 89.4% | WP_045789542 | | | SEQ ID NO: 233 | |
| IPD099-2Be | 89.7% | WP_048047797 | | | SEQ ID NO: 234 | |
| IPD099-2Bf | 89.4% | WP_060390298 | | | SEQ ID NO: 235 | |
| IPD099-2Bg | 89.7% | WP_062826546 | | | SEQ ID NO: 236 | |
| IPD099-2Bh | 89.7% | WP_017778853 | | | SEQ ID NO: 237 | |
| IPD099-2Bi | 89.7% | WP_042040644 | | | SEQ ID NO: 238 | |
| IPD099-2Bj | 86.1% | WP_075384207 | Aeromonas hydrophila | | SEQ ID NO: 239 | |
| IPD099-2Ca | 77% | NCBI EXIJ77039.1 | Erwinia amylovora | | SEQ ID NO: 240 | |
| IPD099-2Cb | 76.5% | WP_043629747 | Chromobacterium piscinae | | SEQ ID NO: 241 | |
| IPD099-2Cc | 77.4% | WP_069590129 | Salinivibrio sp. | | SEQ ID NO: 242 | |
| IPD099-2Cd | 75.9% | WP_071109676 | Chromobacterium amazonense | | SEQ ID NO: 243 | |
| IPD099-2Da | 62% | SSP605C7, SSP605C7-1n | Serratia plymuthica | | SEQ ID NO: 244 | SEQ ID |
| | | | | | | NO: 604 |
| IPD099-2Db | 62% | NCBI WP_010644719.1, | Vibrio campbellii | | SEQ ID NO: 245 | |
| | | WP_005532945.1 | | | | |
| IPD099-2Dc | 61% | JH20785-4 | Serratia plymuthica | | SEQ ID NO: 246 | |
| IPD099-2Dd | 60% | NCBI WP_006320605.1 | Serratia plymuthica | | SEQ ID NO: 247 | |
| IPD099-2De | 61.3% | WP_005532945 | Vibrio campbellii | | SEQ ID NO: 248 | |
| IPD099-2Df | 62.3% | PMC3546H11-1 | | | SEQ ID NO: 249 | |
| IPD099-2Dg | 63% | WP_063524175 | Vibro sp. | | SEQ ID NO: 250 | |
| IPD099-2Dh | 61.7% | PMC3677FB-1 | Serratia ureilytica | | SEQ ID NO: 251 | |
| IPD099-2Di | 62% | WP_074055056 | Serratia marcescens | | SEQ ID NO: 252 | |
| IPD099-2Di | 61.2% | WP_073534094 | Serratia marcescens | | SEQ ID NO: 253 | |
| IPD099-2Ea | 59% | GAK2831.1 | Serratia | | SEQ ID NO: 254 | |
| | | | liquefaciens | | | |
| IPD099-2Eb | 59.5% | A0A0X2PCH1 | Serratia | | SEQ ID NO: 255 | |
| IPD099-2Fa | 41.1% | WP_035095894, | Aquimarina megaterium | | SEQ ID NO: 256 | |
| | | WP_035095894 | | | | |
| IPD099-2Fb | 46.9% | WP_035827333, | Janthinobacterium sp. | | SEQ ID NO: 257 | |
| | | WP_051958568 | | | | |
| IPD099-2Fc | 44.5% | WP_045872306 | Tolypothrix sp. | | SEQ ID NO: 258 | |
| IPD099-2Fd | 40.1% | WP_011221504 | Photobacterium | | SEQ ID NO: 259 | |
| | | | profundum | | | |
| IPD099-2Fe | 46.5% | WP_051990888 | Janthinobacterium | | SEQ ID NO: 260 | |
| | | | lividum | | | |
| IPD099-2Ff | 46.8% | WP_058048092 | Janthinobacterium sp. | | SEQ ID NO: 261 | |
| IPD099-2Fg | 42.6% | A0A0Q4VRG6 | Rhizobium sp. | | SEQ ID NO: 262 | |
| IPD099-2Fh | 41% | WP_035095894 | | | SEQ ID NO: 263 | |
| IPD099-2Fi | 46.5% | WP_051958568 | | | SEQ ID NO: 264 | |
| IPD099-2Fj | 44.6% | A0A137SAT8 | Moritella sp | | SEQ ID NO: 265 | |
| IPD099-2Fk | 46.8% | WP_070302362 | Janthinobacterium sp. | | SEQ ID NO: 266 | |
| IPD099-2Fl | 46.8% | WP_072453575 | Janthinobacterium lividum | | SEQ ID NO: 267 | |
| IPD099-2Ga | 33% | AMG67705 | Providencia stuartii | | SEQ ID NO: 268 | |
| IPD099-2Gb | 38.6% | A0A0T9L222 | Yersinia nurmii | | SEQ ID NO: 269 | |
| IPD099-2Gc | 36.9% | WP_072082496 | Yersinia kristensenii | | SEQ ID NO: 270 | |
| IPD099-2Gd | 30.2% | WP_074407284 | Aquimarina megaterium | | SEQ ID NO: 271 | |
| IPD099-3Ab | 99% | JH82751-1 (1aa differ from | Aeromonas salmonicida | WCRW | SEQ ID NO: 272 | SEQ ID |
| | | Aa); JH78490-2 (1aa); | | | | NO: 605 |
| | | JH91676-2 | | | | |
| IPD099-3Ac | 99% | JH673511 (2aa differ from Aa) | Aeromonas | WCRW | SEQ ID NO: 273 | SEQ ID |
| | | | | | | NO: 606 |
| IPD099-3Ad | 99% | JH67338-1; JH77959-1; | Aeromonas | WCRW | SEQ ID NO: 274 | SEQ ID |
| | | JH77890-1 (1aa); | | | | NO: 607 |
| | | JH78710-1; NCBI - | | | | |
| | | WP_042064546 (1aa); | | | | |
| | | WP_044800223 | | | | |
| IPD099-3Ae | 99% | JH58748-2 | Aeromonas | WCRW | SEQ ID NO: 275 | SEQ ID |
| | | | | | | NO: 608 |
| IPD099-3Af | 96% | NCBI KFN17898.1 | Aeromonas salmonicida | | SEQ ID NO: 276 | |
| IPD099-3Ag | 96% | NCBI WP_011706403.1; | Aeromonas hydrophila | | SEQ ID NO: 277 | |
| | | JH99577-2 | | | | |
| IPD099-3Ah | 96% | NCBI WP_024944912.1; | Aeromonas hydrophila | | SEQ ID NO: 278 | |
| | | internal- JH91484-1 | | | | |
| IPD099-3Ai | 96% | NCBI WP_029300414.1; | Aeromonas hydrophila | | SEQ ID NO: 279 | |
| | | WP_045527026; | | | | |
| | | WP_049047795 | | | | |
| IPD099-3Aj | 96% | NCBI WP_016351062.1 | Aeromonas hydrophila | | SEQ ID NO: 280 | |
| IPD099-3Ak | 96% | NCBI WP_029302782.1 | Aeromonas hydrophila | | SEQ ID NO: 281 | |
| | | | | | SEQ ID NO: 282 | |
| IPD099-3Al | 96% | NCBI WP_019840112.1 | Aeromonas | | | |
| IPD099-3Am | 96% | NCBI KER63313.1 | Aeromonas hydrophila | | SEQ ID NO: 283 | |
| IPD099-3An | 96% | NCBI EZH80103.1 | Aeromonas hydrophila | | SEQ ID NO: 284 | |
| IPD099-3Ao | 95% | JH71362-2, JH70211-1 | Aeromonas | WCRW | SEQ ID NO: 285 | SEQ ID |
| | | | | | | NO: 609 |
| IPD099-3Ap | 95% | K01-14A1-1, K01-20A3-2 | Aeromonas | | SEQ ID NO: 286 | |
| IPD099-3Aq | 95% | NCBI WP_017782951.1 | Aeromonas hydrophila | | SEQ ID NO: 287 | |
| IPD099-3Ar | 95% | NCBI WP_017778852.1 | Aeromonas hydrophila | | SEQ ID NO: 288 | |
| IPD099-3As | 95% | NCBI WP_017764244.1 | Aeromonas hydrophila | | SEQ ID NO: 289 | |
| IPD099-3Ar | 95% | NCBI WP_017784070.1 | Aeromonas hydrophila | | SEQ ID NO: 290 | |
| IPD099-3Au | 95% | NCBI WP_005302111.1 | Aermonas | | SEQ ID NO: 291 | |
| IPD099-3Av | 95% | NCBI WP_017786781.1 | Aeromonas hydrophila | | SEQ ID NO: 292 | |
| IPD099-3Aw | 95% | NCBI WP_010633674.1 | Aeromonas dhakensis | | SEQ ID NO: 293 | |
| IPD099-3Ax | 94% | NCBI WP_024941131.1 | Aeromonas hydrophila | | SEQ ID NO: 294 | |
| IPD099-3Ay | 96% | WP_041216095 | Aeromonas hydrophila | | SEQ ID NO: 295 | |
| IPD099-3Az | 97.7% | WP_042869731 | Aeromonas piscicola | | SEQ ID NO: 296 | |
| IPD099-3Aaa | 99.2% | WP_043556156 | Aeromonas bestiarum | | SEQ ID NO: 297 | |
| IPD099-3Aab | 94.7% | A0A0A5L9U8_{—} | Aeromonas hydrophila | | SEQ ID NO: 298 | |
| IPD099-3Aac | 98.1% | JH78147-1 | Haemophilus piscium | | SEQ ID NO: 299 | |
| IPD099-3Aad | 99.2% | JH78490-2 | | | SEQ ID NO: 300 | |
| IPD099-3Aae | 99.2% | JH91676-2 | | | SEQ ID NO: 301 | |
| IPD099-3Aad | 96.2% | JH77890-1 | | | SEQ ID NO: 302 | |
| IPD099-3Aag | 96.2% | WP_042064546 | | | SEQ ID NO: 303 | |
| IPD099-3Aah | 96.6% | JH78710-1 | | | SEQ ID NO: 304 | |
| IPD099-3Aai | 96.2% | WP_044800223 | | | SEQ ID NO: 305 | |
| IPD099-3Aaj | 96.2% | XM24_pooled_NODE_35_464 | | | SEQ ID NO: 306 | |
| IPD099-3Aak | 96.2% | JH89577-2 | | | SEQ ID NO: 307 | |
| IPD099-3Aal | 96.6% | JH91484 | | | SEQ ID NO: 308 | |
| IPD099-3Aam | 97% | WP_060390297 | | | SEQ ID NO: 309 | |
| IPD099-3Aan | 97% | WP_045527026 | | | SEQ ID NO: 310 | |
| IPD099-3Aao | 96.2% | WP_049047796 | | | SEQ ID NO: 311 | |
| IPD099-3Aap | 96.6% | XM27_pooled_NODE_19_5114 | | | SEQ ID NO: 312 | |
| IPD099-3Aaq | 96.2% | ANT67620 | Aeromonas hydrophila | | SEQ ID NO: 313 | |
| IPD099-3Aar | 97.7% | WP_065403859 | Aeromonas piscicola | | SEQ ID NO: 314 | |
| | | | | | SEQ ID NO: 315 | |
| IPD099-3Aas | 95.1% | WP_065018002 | Aeromonas dhakensis | | | |
| IPD099-3Ca | 77.8% | WP_042036785 | Aeromonas popoffii | | SEQ ID NO: 316 | |
| IPD099-3Ea | 52% | NCBI EXIJ77040.1 | Erwinia mallotivora | | SEQ ID NO: 317 | |
| IPD099-3Fa | 47% | NCBI WP_006532948.1; | Vibrio campbellii | | SEQ ID NO: 318 | |
| | | WP_010644721.1 | | | | |
| IPD099-3Fb | 46% | NCBI GAK28232.1 | Serratia liquefaciens | | SEQ ID NO: 319 | |
| IPD099-3Fc | 42% | JH20785-4, JH78168-2 | Serratia plymuthica | WCRW | SEQ ID NO: 320 | SEQ ID |
| | | | | | | NO: 610 |
| IPD099-3Fd | 46.3% | WP_010644721 | Vibrio campbellii | | SEQ ID NO: 321 | |
| IPD099-3Fe | 49% | WP_043629750 | Chromobacterium | | SEQ ID NO: 322 | |
| | | | piscinae | | | |
| IPD099-3Ff | 43.8% | PMC3546H11-1 | Serratia marcescens | | SEQ ID NO: 323 | |
| IPD099-3Fg | 44.2% | A0A0X2PC11 | Serratia | | SEQ ID NO: 324 | |
| IPD099-3Fh | 45.6% | WP_063524176 | Vibrio sp. | | SEQ ID NO: 325 | |
| IPD099-3Fi | 43.8% | PMC3677F8-1 | Serratia ureilytica | | SEQ ID NO: 326 | |
| IPD099-3Fi | 48.5% | WP_069590131 | Salinivibrio sp. | | SEQ ID NO: 327 | |
| IPD099-3Fk | 47.4% | WP_071109675 | Chromobacterium | | SEQ ID NO: 328 | |
| | | | amazonense | | | |
| IPD099-3Fl | 43.4% | WP_074055055 | Serratia marcescens | | SEQ ID NO: 329 | |
| IPD099-3Fm | 43.4% | WP_073534095 | Serratia marcescens | | SEQ ID NO: 330 | |
| IPD099-3Ga | 37.8% | ANS44859 | Serratia | | SEQ ID NO: 331 | |
| | | | plymuthica | | | |

Table 10 shows the IPD100-1Aa and IPD100-2Aa polypeptide homologs identfied, sequence identification numbers for each and the bacterial isolates they were identified from.

TABLE 10

| | Identity to | | | | | |
|---|---|---|---|---|---|---|
| | IPD100- | | | | | |
| IPD Name | 1/2Aa | Source | Species | activity | Protein | DNA |
| IPD100-1Aa | | JH55673-1 JH19870-2, | Pseudomonas gessardii | WCRW | SEQ ID NO: 332 | SEQ ID NO: 611 |
| | | JH81777-2, JH81870-2 | | | | |
| IPD100-2Aa | | JH55673-1, JH81777-2, | Pseudomonas gessardii | | SEQ ID NO: 333 | SEQ ID NO: 612 |
| | | JH81870-2 | | | | |
| IPD100-1Ba | 86% | JGI 2036107561 | mountain pine beetle microbes | | SEQ ID NO: 334 | |
| IPD100-1Ea | 59.9% | WP_060293698 | Burkholderia ubonensis | | SEQ ID NO: 335 | |
| IPD100-1Fa | 49% | NCBI WP_034419751.1 | Candidatus Entotheonella sp. | | SEQ ID NO: 336 | |
| IPD100-2Ab | 99% | JH19870-2 | Pseudomonas gessardii | WCRW | SEQ ID NO: 337 | SEQ ID NO: 613 |
| IPD100-2Ba | 84.8% | internal pooled XM17 | | | SEQ ID NO: 338 | |
| IPD100-2Ca | 72.3% | WP_060293699 | Burkholderia ubonensis | | SEQ ID NO: 339 | |
| IPD100-2Ea | 56% | NCBI ETW97596.1 | Candidatus Entotheonella sp. | | SEQ ID NO: 340 | |
| IPD100-2Ga | 36.8% | A0A0P9N9S1 | Pseudomonas syringae | | SEQ ID NO: 341 | |
| IPD100-2Gb | 36.2% | A0A0Q6U9X6 | Duganella sp. | | SEQ ID NO: 342 | |
| IPD100-2Gc | 36.8% | A0A0P9THA2 | | | SEQ ID NO: 343 | |
| IPD100-2Gd | 34.3% | A0A0Q8R323 | | | SEQ ID NO: 344 | |
| IPD100-2Ge | 34.5% | WP_065336555 | Salmonella enterica | | SEQ ID NO: 345 | |
| IPD100-2Gf | 32.7% | WP_064966240 | Tenacibaculum ovolyticum | | SEQ ID NO: 346 | |
| IPD100-2Gg | 33.5% | A0A0B2TSA4 | Dickeya solani | | SEQ ID NO: 347 | |
| IPD100-2Gh | 35% | WP_074607035 | Pelobacter steyni | | SEQ ID NO: 348 | |
| IPD100-2Gi | 33.8% | WP_076246106 | Mycobacterium sp. | | SEQ ID NO: 349 | |

Table 11 shows the IPD105Aa polypeptide homologs identified, sequence identification numbers for each and the bacterial isolates they were identified from.

TABLE 11

| | Identity to | | | | | |
|---|---|---|---|---|---|---|
| IPD Name | IPD105Aa | Source | Species | activity | Protein | DNA |
| IPD105Aa | | JH90961-1, JH97541-1, | Chromobacterium aquaticum | WCRW | SEQ ID NO: 350 | SEQ ID NO: 614 |
| | | JH90377-1, SSP555D9c, | | | | |
| IPD105Ab | 99% | NCBI WP_019104214. | Chromobacterium | WCRW | SEQ ID NO: 351 | SEQ ID NO: 615 |
| | | | sp. C-61 | | | |
| IPD105Ac | 99% | JH96390-2, JH94105-2, | | | SEQ ID NO: 362 | |
| | | JH97517-1, JH97285-1, | | | | |
| | | JH97240-1, JH90688-1, | | | | |
| | | NCBI_WP_043589636.1 | | | | |
| IPD105Ad | 98% | JH90976-1 | | | SEQ ID NO: 353 | |
| IPD105Ae | 99% | NCBI WP_043637141.1 | Chromobacterium | | SEQ ID NO: 354 | |
| | | | haemolyticum | | | |
| IPD105Af | 95.1% | XM27_pooled | | | SEQ ID NO: 355 | |
| IPD105Ba | 89.6% | WP_048410860 | Chromobacterium | | SEQ ID NO: 356 | |
| IPD105Ea | 56% | JH94452-1 | Chromobacterium | WCRW | SEQ ID NO: 357 | SEQ ID NO: 616 |
| IPD105Eb | 55.7% | NCBI WP_045052236.1, | Chromobacterium | | SEQ ID NO: 358 | |
| | | gb\|KJH65942.1, | violaceum | | | |
| | | WP_011134423.1 | | | | |
| IPD105Ec | 58% | NCBI WP_021475143.1, | Pseudogulbenkiania | | SEQ ID NO: 359 | |
| | | gb\|ERE20223.1 | ferrooxidans | | | |
| IPD105Ed | 51% | NCBI WP_043621092.1, | Chromobacterium | | SEQ ID NO: 360 | |
| | | gb\|KIA81985.1 | piscinae | | | |
| IPD105Ee | 56.6% | WP_052258131, | Chromobacterium subtsugae | | SEQ ID NO: 361 | |
| | | WP_052941274 | | | | |
| IPD105Ef | 51.2% | A0A0J6QEL9 | | | SEQ ID NO: 362 | |
| IPD105Eg | 56% | WP_052941274 | | | SEQ ID NO: 363 | |
| IPD105Eh | 53.7% | WP_071111093 | Chromobacterium | | SEQ ID NO: 364 | |
| IPD105Fa | 49.8% | WP_07110944.2 | Chromobacterium amazonense | | SEQ ID NO: 365 | |

[0451] Table 12 shows a matrix table of pair-wise identity relationships for global alignments of the IPD105Aa homologs, based upon the Needleman-Wunsch algorithm, as implemented in the Needle program (EMBOSS tool suite).

TABLE 12

| | IPD105Ab | SPD105Ac | IPD105Ad | IPD105Ae | IPD105Af | IPD105Ba | IPD105Ea |
|---|---|---|---|---|---|---|---|
| IPD105Aa | 93.9 | 98.8 | 98.2 | 93.3 | 95.1 | 89.6 | 52.4 |
| IPD105Ab | — | 93.3 | 92.7 | 98.1 | 90.2 | 94.2 | 55.8 |
| IPD105Ac | — | — | 99.4 | 92.7 | 96.3 | 89.0 | 52.4 |
| IPD105Ad | — | — | — | 92.1 | 95.7 | 88.4 | 52.4 |
| IPD105Ae | — | — | — | — | 90.9 | 94.8 | 54.5 |
| IPD105Af | — | — | — | — | — | 92.1 | 51.8 |
| IPD105Ba | — | — | — | — | — | — | 54.5 |
| IPD105Ea | — | — | — | — | — | — | — |
| IPD105Eb | — | — | — | — | — | — | — |
| IPD105Ec | — | — | — | — | — | — | — |
| IPD105Ed | — | — | — | — | — | — | — |
| IPD105Ee | — | — | — | — | — | — | — |
| IPD105Ef | — | — | — | — | — | — | — |
| IPD105Eg | — | — | — | — | — | — | — |

| | IPD105Eb | IPD105Ec | IPD105Ed | IPD105Ee | IPD105Ef | IPD105Eg | IPD105Eh |
|---|---|---|---|---|---|---|---|
| IPD105Aa | 53.0 | 53.0 | 48.8 | 46.5 | 53.0 | 56.0 | 65.1 |
| IPD105Ab | 56.4 | 56.4 | 51.0 | 59.7 | 56.4 | 59.1 | 58.2 |
| IPD105Ac | 53.0 | 53.0 | 48.2 | 57.2 | 53.0 | 56.6 | 55.8 |
| IPD105Ad | 52.4 | 53.0 | 48.2 | 57.2 | 52.4 | 56.6 | 55.8 |
| IPD105Ae | 55.1 | 55.1 | 49.7 | 59.1 | 55.1 | 58.5 | 57.0 |
| IPD105Af | 52.4 | 52.4 | 47.6 | 58.6 | 52.4 | 56.0 | 55.2 |
| IPD105Ba | 55.1 | 55.1 | 50.3 | 57.2 | 55.1 | 56.6 | 56.2 |
| IPD105Ea | 92.5 | 90.5 | 59.0 | 65.4 | 93.2 | 64.7 | 67.3 |
| IPD105Eb | — | 91.8 | 59.6 | 66.7 | 99.3 | 66.0 | 67.9 |
| IPD105Ec | — | — | 58.3 | 65.4 | 92.6 | 64.7 | 66.7 |
| IPD105Ed | — | — | — | 60.9 | 59.6 | 60.3 | 61.4 |
| IPD105Ee | — | — | — | — | 66.7 | 99.4 | 88.5 |
| IPD105Ef | — | — | — | — | — | 66.0 | 67.9 |
| IPD105Eg | — | — | — | — | — | — | 87.8 |

Table 13 shows the IPD106-1Aa and IPD106-2Aa polypeptide homologs identified, sequence identification numbers for each and the bacterial isolates they were identified from.

TABLE 13

| | Identity to | | | | | |
|---|---|---|---|---|---|---|
| | IPD106- | | | | | |
| IPD Name | 1/2Aa | Source | Species | activity | | |
| IPD106-1Aa | | JH8820-1 | Chitinophaga | WCRW | SEQ ID NO: 366 | SEQ ID NO: 617 |
| | | | pinensis | | | |
| IPD106-2Aa | | JH48820-1 | Chitinophaga | | SEQ ID NO: 367 | SEQ ID NO: 618 |
| | | | pinensis | | | |
| IPD106-1Ab | 92.6% | internal- D6270037 | Taxon P0045 pooled | | SEQ ID NO: 368 | |
| IPD106-1Ca | 72.8% | PMCJ3307D3-1 | Chitinophaga sp. | WCRW | SEQ ID NO: 369 | SEQ ID NO: 619 |
| IPD106-1Da | 63% | JGI: 2165210246 | Switchgrass rhizosphere metagenome | | SEQ ID NO: 370 | |
| IPD106-1Ea | 51.3% | WP_071503955 | Arsenicibacter rosenii | | SEQ ID NO: 371 | |
| IPD106-2Ba | 87.3% | internal- D6270037 | Taxon P0045 pooled | WCRW | SEQ ID NO: 372 | SEQ ID NO: 620 |
| IPD106-2Bb | 80.2% | PMCJ3307D3-1 | Chitinophaga sp. | | SEQ ID NO: 373 | |
| IPD106-2Ea | 55% | JGI: 2165039070 | Switchgrass rhizosphere | | SEQ ID NO: 374 | |
| | | | metagenome | | | |
| IPD106-2Fa | 41.4% | WP_071503954 | Arsenicibacter rosenii | | SEQ ID NO: 375 | |
| IPD106-2Ga | 37.6% | A0A0G3A128 | Archangium gephyra | | SEQ ID NO: 376 | |

Table 14 shows the IPD107Aa polypeptide homoologs identified, sequence identification numbers for each and the bacterial isolates they were identified from.

TABLE 14

| | Identity to | | | | | |
|---|---|---|---|---|---|---|
| IPD Name | IPD107Aa | Source | Species | activity | Protein | DNA |
| IPD107Aa | | JH60888-1, JH62342-2, | Pseudomonas brassicacearum | WCRW | SEQ ID NO: 377 | SEQ ID NO: 621 |
| | | JH61870-1, JH61310-1-1, | | | | |
| | | JH60848-1; WP_040071980 | | | | |
| | | (2aa) | | | | |
| IPD107Ab | 96.3% | JH77717-1, JH77706-1, | Pseudomonas brassicacearum | | SEQ ID NO: 378 | SEQ ID NO: 622 |
| | | JH75881-1, SSP347B8a | | | | |
| | | (1aa) | | | | |
| IPD107Ac | 92.5% | WP_017901970 | Pseudomonas | | SEQ ID NO: 379 | |
| | | | fuscovaginae | | | |
| IPD107Ad | 98.1% | WP_040071980 | | | SEQ ID NO: 380 | |
| IPD107Ae | 95.3% | SSP347B8a | | | SEQ ID NO: 381 | |
| IPD107Ba | 83.2% | JH93481-1 | Pseudomonas parafulva | | SEQ ID NO: 362 | SEQ ID NO: 623 |
| IPD107Bb | 80.4% | SSP10A9a, SSP509A5b, | | | SEQ ID NO: 363 | |
| | | SSP509A5a; | | | | |
| | | WP_017124730 | | | | |
| IPD107Ca | 77.6% | SSP652H10-1, SSP652H3-1, | Pseudomonas | | SEQ ID NO: 364 | SEQ ID NO: 624 |
| | | SSP652H2-1, SSP650H5-1, | chlororaphis | | | |
| | | SSP650H1-2, SSP648H11-1, | | | | |
| | | SSP648H7-1, SSP648H5-1 | | | | |
| IPD107Cc | 76.6% | LBNL154D2-1, LBNL154C2-1 | | | SEQ ID NO: 365 | |
| | | LBNL154B2-1, | | | | |
| | | LBNL151A2-2, LBNL151D1-1 | | | | |
| | | LBNL151B1-2, | | | | |
| | | SSP630B11-1, | | | | |
| | | SSP596B11d, LBNL151C1-1 | | | | |
| | | SSP631G11-1, | | | | |
| | | SSP630H8-1, SSP596B7c, | | | | |
| | | JH23300-1, JH68784-1, | | | | |
| | | JH67396-1, MX3C7, | | | | |
| | | LBV08710-7, LBV10044-5, | | | | |
| | | SSP374H3-7, LBV8556-5, | | | | |
| | | LBV10056, JH22647-2, | | | | |
| | | JH22857-2, JH22817-1, | | | | |
| | | JH59295-2, JH58797-1, | | | | |
| | | JH58576-1, JH23965-2, | | | | |
| | | JH23148-1, JH22841-2, | | | | |
| | | JH21457-2 JH21296-2, | | | | |
| | | JH20150-1, BAQ71928, | | | | |
| | | A0A0D689V9, | | | | |
| | | WP_016963092, JH20286-4 | | | | |
| | | (1aa) | | | | |
| IPD107Cd | 73.8% | JH71892-1, JH71833-2, | Pseudomonas protegens | | SEQ ID NO: 386 | |
| | | JH71826-1, JH71539-1 | | | | |
| IPD107Ce | 74.8% | JH72069-2, JH1668-2, | Pseudomonas monteilii | | SEQ ID NO: 387 | |
| | | JH69828-1 (1aa) | | | | |
| IPD107Cf | 71% | SSP587D6-1 | | | SEQ ID NO: 388 | |
| IPD107Cg | 74.1% | JH85760-1 | Pseudomonas | | SEQ ID NO: 389 | |
| | | | frederiksbergensis | | | |
| IPD107Ch | 71% | SSP459A9-4, SSP551G4b | | | SEQ ID NO: 390 | |
| | | (1aa), SSP551G5a (1aa) | | | | |
| IPD107Ci | 70.4% | JH18994-3, JH18447-2 | Pseudomonas rhodesiae | | SEQ ID NO: 391 | |
| IPD107Cj | 70.4% | SSP719C3-1, SSP616E3-1, | | | SEQ ID NO: 392 | SEQ ID NO: 625 |
| | | SSP615D3-2, SSP616E6-2, | | | | |
| | | LBV4325, JH69839-1; | | | | |
| | | WP_007952780; SSP8B7 | | | | |
| | | (1aa), JH19281-2 (1aa), | | | | |
| | | J3FC90, WP_003220553 | | | | |
| | | (1aa), WP_034151843 (2aa) | | | | |
| IPD107Ck | 77.6% | WP_023969973, SSP652H6-1 | Pseudomonas | | SEQ ID NO: 393 | |
| | | (1aa), SSP652H1-2 (1aa), | chlororaphis | | | |
| | | SSP652D6-1 (1aa), | | | | |
| | | SSP650H4-1 (1aa), | | | | |
| | | SSP143C2 (1aa) | | | | |
| IPD107Cl | 74.8% | WP_025128520 | Pseudomonas sp. | | SEQ ID NO: 394 | |
| IPD107Cm | 71.3% | WP_038978461 | Pseudomonas | | SEQ ID NO: 395 | |
| IPD107Cn | 71.3% | JH102832-1 | Pseudomonas | | SEQ ID NO: 396 | |
| | | | fluorescens | | | |
| IPD107Co | 71.3% | internal pooled XM17 | | | SEQ ID NO: 397 | |
| IPD107Cp | 71.3% | internal pooled XM17 | | | SEQ ID NO: 398 | |
| IPD107Cq | 70.4% | WP_054616563 | Pseudomonas sp. | | SEQ ID NO: 399 | |
| IPD107Ct | 74.1% | internal pooled XM24 | | | SEQ ID NO: 400 | |
| IPD107Cu | 70.4% | internal pooled XM24 | | | SEQ ID NO: 401 | |
| IPD107Cv | 71.3% | P0114 | Taxon pooled sample | | SEQ ID NO: 402 | |
| IPD107Cx | 77.6% | JH20286-4 | | | SEQ ID NO: 403 | |
| IPD107Cy | 73.8% | XM31_pooled_NODE_102_2137 | | | SEQ ID NO: 404 | |
| IPD107Cz | 73.8% | JH69828-1 | | | SEQ ID NO: 405 | |
| IPD107Caa | 73.1% | WP_054047873 | | | SEQ ID NO: 406 | |
| IPD107Cab | 70.1% | SSP551G4b | | | SEQ ID NO: 407 | |
| IPD107Cac | 70.4% | WP_034151843 | | | SEQ ID NO: 408 | |
| IPD107Cad | 70.4% | XM22_pooled_NODE_3714_78 | | | SEQ ID NO: 409 | |
| IPD107Cae | 76.6% | SSP652H6-1 | | | SEQ ID NO: 410 | |
| IPD107Caf | 70.4% | XM17_pooled_NODE_17832_14 | | | SEQ ID NO: 411 | |
| IPD107Cag | 72.2% | PMC3015E8-2 | | | SEQ ID NO: 412 | |
| IPD107Cah | 71.3% | PMC3618B11-1 | | | SEQ ID NO: 413 | |
| IPD107Cai | 70.4% | internal pooled HK-23 | | | SEQ ID NO: 414 | |
| IPD107Caj | 70.4% | internal pooled HK-24 | | | SEQ ID NO: 415 | |
| IPD107Cak | 75.7% | WP_068580103 | Pseudomonas | | SEQ ID NO: 416 | |
| IPD107Da | 68.5% | SSP452E2-1 | Pseudomonas | | SEQ ID NO: 417 | SEQ ID NO: 626 |
| | | | brassicacearum | | | |
| IPD107Db | 68.5% | SSP562B7b, JH58586-2 | | | SEQ ID NO: 418 | |
| | | (1aa), JH31096-2 (1aa), | | | | |
| | | JH34637-1 (1aa), JH32046-2 | | | | |
| | | (1aa), JH17095-4 (1aa), | | | | |
| | | JH17069-1 (1aa), | | | | |
| | | SSP346B1a (2aa), JH18316-4 | | | | |
| | | (2aa), JH31283-1 (2aa), | | | | |
| | | JH17340-4 (2aa), JH17338-2 | | | | |
| | | (2aa) | | | | |
| IPD107Dc | 69.2% | JH19896-4, JH19820-2, | Pseudomonas | | SEQ ID NO: 419 | |
| | | JH90148-1 (1aa), JH89756-1 | chlororaphis | | | |
| | | (1aa), JH94168-1 (1aa), | | | | |
| | | JH94122-1 (1aa), JH94108-1 | | | | |
| | | (1aa), JH94092-2 (1aa), | | | | |
| | | JH94070-1 (1aa), JH94046-1 | | | | |
| | | (1aa), JH94031-1 (1aa), | | | | |
| | | JH72002-1 (1aa), JH71363-1 | | | | |
| | | (1aa), JH66281-1 (1aa), | | | | |
| | | SSN45H3 (1aa), JH36960-1 | | | | |
| | | (1aa), SSP560H5b (2aa), | | | | |
| | | DC14B2 (2aa) | | | | |
| IPD107Dd | 68.5% | JH31121-1 | Pseudomonas | | SEQ ID NO: 420 | |
| | | | frederiksbergensis | | | |
| IPD107De | 69.4% | JH72599-2, SSP475F12-1, | Pseudomonas | | SEQ ID NO: 421 | |
| | | WP_039764506 | fluorescens | | | |
| IPD107Df | 68.5% | JH87747-2, JH75493-1 | Serratia plymuthica | | SEQ ID NO: 422 | |
| IPD107Dg | 69.4% | WP_02511024, | Pseudomonas sp. | | SEQ ID NO: 423 | |
| | | WP_007919145 (1aa), | | | | |
| | | WP_042557100 (1aa) | | | | |
| IPD107Dh | 68.5% | WP_007963451 | Pseudomonas sp. | | SEQ ID NO: 424 | |
| IPD107Di | 67.6% | WP_047601000 | Pseudomonas sp. | | SEQ ID NO: 425 | |
| IPD107Dj | 69.4% | PMC3508D8-1 | Pseudomonas | | SEQ ID NO: 426 | |
| | | | fluorescens | | | |
| IPD107Dk | 67.6% | internal pooled XM17 | | | SEQ ID NO: 427 | |
| IPD107Dl | 68.5% | internal pooled XM20 | | | SEQ ID NO: 428 | |
| IPD107Dm | 68.5% | JH31096-2 | | | SEQ ID NO: 429 | |
| IPD107Dn | 69.4% | SSP346B1a | | | SEQ ID NO: 430 | |
| IPD107Do | 69.4% | JH58586-2 | | | SEQ ID NO: 431 | |
| IPD107Dp | 68.5% | JH31283-1 | | | SEQ ID NO: 432 | |
| IPD107Dq | 69.2% | JH90148-1 | | | SEQ ID NO: 433 | |
| IPD107Dr | 68.2% | SSP560H5b | | | SEQ ID NO: 434 | |
| IPD107Ds | 69.2% | DC14B2 | | | SEQ ID NO: 435 | |
| IPD107Dt | 67.6% | WP_007919145 | | | SEQ ID NO: 436 | |
| IPD107Du | 67.6% | WP_042557100 | | | SEQ ID NO: 437 | |
| IPD107Dv | 69.4% | XM24_pooled_NODE_138_1840 | | | SEQ ID NO: 438 | |
| IPD107Dw | 68.5% | XM17_pooled_NODE_2233_214 | | | SEQ ID NO: 439 | |
| IPD107Dx | 69.4% | SSP8B7 | | | SEQ ID NO: 440 | |
| IPD107Dy | 69.4% | WP_003220553 | | | SEQ ID NO: 441 | |
| IPD107Dz | 69.4% | XM16_pooled_NODE_40846_1 | | | SEQ ID NO: 442 | |
| IPD107Daa | 68.5% | PMCJ3261G6-1 | | | SEQ ID NO: 443 | |
| IPD107Dab | 69.4% | WP_064117478 | Pseudomonas | | SEQ ID NO: 444 | |
| | | | fluorescens | | | |
| IPD107Dac | 66.7% | SDR78243 | Pseudomonas sp. | | SEQ ID NO: 445 | |
| IPD107Fa | 42.7% | JH91906-1, JH91791-1 | Chromobacterium haemolyticum | | SEQ ID NO: 446 | SEQ ID NO: 627 |
| IPD107Fb | 41.7% | WP_02834481 | Bradyrhizobium elkanii | | SEQ ID NO: 447 | |
| IPD107Fc | 42.6% | WP_029064374 | Bradyrhizobium sp. | | SEQ ID NO: 448 | SEQ ID NO: 628 |
| IPD107Fd | 40.7% | WP_038361133 | Bradyrhizobium elkanii | | SEQ ID NO: 449 | |
| IPD107Fe | 45.4% | WP_050632090 | Bradyrhizobium sp. | | SEQ ID NO: 450 | |
| IPD107Ff | 42.1% | Taxon Pooled | | | SEQ ID NO: 451 | |
| | | P0053_D6840010_NODE_331_956 | | | | |
| IPD107Ga | 33.3% | XM28_pooled_NODE_163_467 | | | SEQ ID NO: 452 | |

Table 15 shows the IPD111Aa polypeptide homologs identified, sequence identification numbers for each and the bacterial isolates they were identified from.

TABLE 15

| | Identity to | | | | | |
|---|---|---|---|---|---|---|
| IPD Name | IPD111Aa | Source | Species | activity | Protein | DNA |
| IPD111Aa | | JH59138-1 | Burkholderia | WCRW | SEQ ID NO: 453 | SEQ ID NO: 629 |
| | | | ambifaria | | | |
| IPD111Ab | 98.2% | SSP672A11-1, SSP674A8-1 | Burkholderia | | SEQ ID NO: 454 | |
| | | | ambifaria | | | |
| IPD111Ac | 98.2% | JH72812-1 | Burkholderia | WCRW | SEQ ID NO: 455 | SEQ ID NO: 630 |
| | | | diffusa | | | |
| IPD111Ad | 97.3% | JH72375-2, JH72383-2 | Burkholderia | WCRW, SBL, | SEQ ID NO: 456 | SEQ ID NO: 631 |
| | | | ambifaria | CEW, FAW | | |
| IPD111Ba | 84.5% | WP_069242065 | Burkholderia fatens | | SEQ ID NO: 457 | |
| IPD111Ca | 73.8% | WP_47904279 | | | SEQ ID NO: 458 | |
| IPD111Cb | 74.4% | WP_065504152 | Burkholderia stabilis | | SEQ ID NO: 459 | |
| IPD111Da | 65.8% | WP_057929659 | Burkholderia ambifaria | | SEQ ID NO: 460 | |
| IPD111Db | 64.9% | WP_057926891 | Burkholderia ambifaria | | SEQ ID NO: 461 | |
| IPD111Fa | 48.4% | JH33490-1, JH44778-1 | Burkholderia ambifaria | WCRW | SEQ ID NO: 462 | SEQ ID NO: 632 |
| IPD111Fb | 47.9% | SSP652C4-1 | Burkholderia sp. | | SEQ ID NO: 463 | |
| IPD111Fc | 49.6% | WP_06759785 | | | SEQ ID NO: 464 | |
| IPD111Fd | 48.7% | JH7091-2; JH47108-1; | Burkholderia ambifaria | | SEQ ID NO: 465 | |
| | | JH51223-1 | | | | |
| IPD111Fe | 49% | JH51372-1; SSP283G7-1 | Burkholderia fata | | SEQ ID NO: 466 | |
| IPD111Ff | 49.6% | JH31254-2 | Burkholderia cenocepacia | | SEQ ID NO: 467 | |
| IPD111Fg | 49.6% | JH11173-1 | Burkholderia ambifaria | | SEQ ID NO: 468 | |
| IPD111Fh | 49.3% | JH91810-2 | Burkholderia ambifaria | | SEQ ID NO: 469 | |
| IPD111Fi | 48.4% | SSP657E4-1 | Burkholderia ambifaria | | SEQ ID NO: 470 | |
| IPD111Fj | 48.8% | JH58609-1 | Burkholderia ambifaria | | SEQ ID NO: 471 | |
| IPD111Fk | 48.4% | SSP652A2-1 | Burkholderia ambifaria | | SEQ ID NO: 472 | |
| IPD111Fl | 43.8% | SSP283D11-1 | Burkholderia ambifaria | | SEQ ID NO: 473 | |
| IPD111Fm | 49.6% | D6270030 | Taxon P0024 pooled | | SEQ ID NO: 474 | |
| | | | samples | | | |
| IPD111Fn | 48.7% | D6270042 | Taxon P0067 pooled | | SEQ ID NO: 475 | |
| | | | samples | | | |
| IPD111Fo | 48.5% | D6270045 | Taxon P0115 pooled | | SEQ ID NO: 476 | |
| | | | samples | | | |
| IPD111Fp | 49.6% | WP_059523551_lipase | Burkholderia cepacia | | SEQ ID NO: 477 | |
| IPD111Fq | 40% | Taxon Pooled | Taxon D684 pooled | | SEQ ID NO: 478 | |
| | | P0038_D6840007_NODE_500_415 | sample | | | |
| IPD111Fr | 48% | P0123_D6840018_NODE_1450_17 | Taxon D684 pooled | | SEQ ID NO: 479 | |
| | | | sample | | | |
| IPD111Fs | 49.6% | WP_059769828_lipase | Burkholderia territorii | | SEQ ID NO: 480 | |
| IPD111Fl | 49.6% | WP_059506011_lipase | Burkholderia territorii | | SEQ ID NO: 481 | |
| IPD111Fu | 49.6% | WP_060136307_lipase | Burkholderia territorii | | SEQ ID NO: 482 | |
| IPD111Fv | 49.6% | WP_060257678_lipase | Burkholderia territorii | | SEQ ID NO: 483 | |
| IPD111Fw | 49.6% | WP_060295530_lipase | Burkholderia territorii | | SEQ ID NO: 484 | |
| IPD111Fx | 49.6% | WP_059545996_lipase | Burkholderia territorii | | SEQ ID NO: 485 | |
| IPD111Fy | 49.3% | WP_060348612_lipase | Burkholderia territorii | | SEQ ID NO: 486 | |
| IPD111Fz | 49.3% | WP_060103013_lipase | Burkholderia territorii | | SEQ ID NO: 487 | |
| IPD111Faa | 49% | WP_059870323_lipase | Burkholderia territorii | | SEQ ID NO: 488 | |
| IPD111Fab | 41.7% | SSP965C9-1 | Pseudomonas | WCRW | SEQ ID NO: 489 | SEQ ID NO: 633 |
| | | | chlororaphis | | | |
| IPD111Fac | 49.3% | WP_059702086 | | | SEQ ID NO: 490 | |
| IPD111Fad | 49.3% | WP_059691143 | | | SEQ ID NO: 491 | |
| IPD111Fae | 49% | WP_059951984 | | | SEQ ID NO: 492 | |
| IPD111Faf | 49.3% | WP_059449404 | | | SEQ ID NO: 493 | |
| IPD111Fah | 49% | WP_060330215 | | | SEQ ID NO: 494 | |
| IPD111Fai | 49% | WP_060121537 | | | SEQ ID NO: 495 | |
| IPD111Faj | 44.4% | AMP40097_lipase | Ralstonia solanacearum | | SEQ ID NO: 496 | |
| IPD111Fak | 40.2% | JH22700-1 | | | SEQ ID NO: 497 | |
| IPD111Fal | 40.2% | JH93224-1 | | | SEQ ID NO: 498 | |
| IPD111Fam | 47.9% | JH51223-1 | | | SEQ ID NO: 499 | |
| IPD111Fan | 41.1% | SDS88364_Lipase | Pseudomonas | | SEQ ID NO: 500 | |
| | | | chloraphis | | | |
| IPD111Fao | 40.2% | BAV76361_lipase | Pseudomonas | | SEQ ID NO: 501 | |
| | | | chloraphis | | | |
| IPD111Ga | 38.5% | P0391 | Taxon pooled samples | | SEQ ID NO: 502 | |
| IPD111Gb | 36.5% | P0407 | Taxon pooled samples | | SEQ ID NO: 503 | |
| IPD111Gc | 39.4% | internal pooled YJP-8 | | | SEQ ID NO: 504 | |
| IPD111Gd | 39.4% | internal pooled YJP-7 | | | SEQ ID NO: 505 | |
| IPD111Ge | 36.3% | P0391 | Taxon pooled samples | | SEQ ID NO: 506 | |
| IPD111Gf | 37.4% | XM27_pooled_NODE_8699_33 | | | SEQ ID NO: 507 | |
| IPD111Gg | 39.9% | XM31_pooled_NODE_68_2723 | | | SEQ ID NO: 508 | |
| IPD111Gh | 38.5% | XM27_pooled_NODE_11503_14 | | | SEQ ID NO: 509 | |
| IPD111Gi | 39.4% | WP_062922774 | | | SEQ ID NO: 510 | |
| IPD111Gj | 39.4% | PMC3632G10-1 | | | SEQ ID NO: 511 | |
| IPD111Gk | 39.9% | PMCJ329E8-1 | | | SEQ ID NO: 512 | |
| IPD111Gl | 39.9% | XM27_pooled_NODE_152_1222 | | | SEQ ID NO: 513 | |
| IPD111Gm | 38.8% | PMC3093AB-1 | Pseudomonas baetica | | SEQ ID NO: 514 | |
| IPD111Gn | 39.9% | JH20450-1 | | | SEQ ID NO: 515 | |
| IPD111Go | 39.7% | JH52581-2 | | | SEQ ID NO: 516 | |
| IPD111Gp | 39.7% | JH19881-4 | | | SEQ ID NO: 517 | |
| IPD111Gq | 39.7% | JH20401-2 | | | SEQ ID NO: 518 | |
| IPD111Gr | 39.7% | JH19896-4 | | | SEQ ID NO: 519 | |
| IPD111Gs | 39.9% | JH25061-1 | | | SEQ ID NO: 520 | |
| IPD111Gt | 39.9% | JH106357-1 | | | SEQ ID NO: 521 | |
| IPD111Gu | 37.1% | JH18110-4 | | | SEQ ID NO: 522 | |
| IPD111Gv | 39% | SDU67175_lipase | Pseudomonas | | SEQ ID NO: 523 | |
| | | | mediterranea | | | |
| IPD111Gw | 35.5% | SDU97137_lipase | Pseudomonas corrugata | | SEQ ID NO: 524 | |
| IPD111Gx | 31.2% | WP_071810643_lipase | Burkholderia | | SEQ ID NO: 525 | |
| | | | pseudomallei | | | |
| IPD111Gy | 39.9% | PMC_34221C2-1 | Pseudomonas chlororaphis | | SEQ ID NO: 526 | SEQ ID NO: 634 |
| IPD111Gz | 37.4% | WP_072394639_lipase | Pseudomanas sp. | | SEQ ID NO: 527 | |
| IPD111Gaa | 31.5% | WP_071893161 | Burkholderia | | SEQ ID NO: 528 | |
| | | | pseudomallei | | | |

Table 16 shows the IPD112Aa polyptide homologs identified, sequence identification numbers for each and the bacterial isolates they were identification.

TABLE 16

| | Identity to | | | | | |
|---|---|---|---|---|---|---|
| IPD Name | IPD112Aa | Source | Species | activity | | |
| IPD112Aa | | SSP640H4-1, SSP640H7-1 | Pseudomonas vranovensis | WCRW | SEQ ID NO: 529 | SEQ ID NO: 635 |
| IPD112Ab | 90% | SSP1049G2-1 | Pseudomonas | | SEQ ID NO: 530 | |
| | | | mosselii | | | |
| IPD112Ea | 54.7% | JH91108-2; SSP519B5b; | Pseudomonas vranovensis | WCRW | SEQ ID NO: 531 | SEQ ID NO: 636 |
| | | JH91611-1; gi771573074 | | | | |
| IPD112Eb | 52.5% | JH31230-2; SSP473A12-1 | Pseudomonas poae | WCRW | SEQ ID NO: 532 | SEQ ID NO: 637 |
| IPD112Ec | 50.2% | parial_WP_048401789 | | | SEQ ID NO: 533 | |
| IPD112Fa | 46.5% | JH68858-1; 15AKG2; | Pseudomonas | WCRW, | SEQ ID NO: 534 | SEQ ID NO: 638 |
| | | JH67425-2; JH67950-2 | protegens | SGSB | | |
| IPD112Fb | 49.7% | NCBI gi860274938 | | | SEQ ID NO: 535 | |
| IPD112Fc | 49.7% | WP_059763362 | Pseudomonas | | SEQ ID NO: 536 | |
| IPD112Fd | 46.5% | PMC353B5-1 | | | SEQ ID NO: 537 | |
| IPD112Ga | 39.5% | NCBI gi902539997 | | | SEQ ID NO: 538 | |
| IPD112Gb | 38.9% | NCBI gi748796500 | | | SEQ ID NO: 539 | |
| IPD112Gc | 38.9% | NCBI gi759783199 | | | SEQ ID NO: 540 | |
| IPD112Gd | 38.9% | NCBI gi815717717 | | | SEQ ID NO: 541 | |
| IPD112Ge | 38.6% | NCBI gi764039999 | | | SEQ ID NO: 542 | |
| IPD112Gf | 37.3% | NCBI gi496088163 | | | SEQ ID NO: 543 | |
| IPD112Gg | 37.9% | WP_061060315 | | | SEQ ID NO: 544 | |
| IPD112Gh | 38.9% | A0A1C6Z1H7 | Hafnia alvei | | SEQ ID NO: 545 | |

### Example 8

### Gene Subcloning and E. coli Expression

[0452] The target genes encoding the insecticidal proteins were first amplified by PCR using their genomic DNA as templates. The PCR primers were designed based on the 5′ end and 3′ end sequences of the gene either with appropriate restriction site incorporated or with added sequences overlapping with the 5′ and 3′ ends of the linearized E. coli expression vector. With restriction enzyme digestion and ligation or homolog recombination based cloning, the PCR products were cloned into selected E. coli expression vectors, i.e. pCOLD™ 1, 3, pET16, 24, 28 for N-, C-His tag and no tag expression. In some cases, pMAL™ vector was used for MBP fusion expression. In case of co-expression of two proteins for binary toxins, their native operon sequences were also cloned into one of the E. coli vectors. The proteins were expressed in BL21(DE3), C41 or SHuffle® E. coli hosts cells with 1 mM IPTG overnight induction at 16° C.

[0453] The recombinant protein was extracted from E. coli culture after induction. Cell clear lysates or purified proteins were assayed against WCRW as described in Exemple 1.

[0454] The purify recombinant proteins were tested on each insect target with dilution series and the minimal inhibitory concentrations were calculated (Table 17 and Table 16).

Table 17. IPD proteins and their minimal inhibitory concentrations on insect targets based on incorporation in artificial diet bioassays.

TABLE 17

| Protein | WCRW | | CEW | ECB | FAW | SBL | VBC |
|---|---|---|---|---|---|---|---|
| IPD092-1Aa/IPD092-2Aa | ~25 ppm/~35 ppm | | n.t.* | | | n.t. | n.t. |
| IPD097Aa | ~600 | ppm | n.t. | | | n.t. | n.t. |
| IPD100-1Aa/IPD100-2Aa | ~1 ppm/~2 ppm | | n.t. | n.t. | n.t. | n.t. | n.t. |
| IPD105Aa | 2667 | ppm | n.t. | n.t. | n.t. | n.t. | n.t. |
| IPD107Aa | 1100 | ppm | n.t. | n.t. | n.t. | n.t. | n.t. |
| IPD112Aa | 160 | ppm | >1250 ppm | >1250 ppm | >1250 ppm | >1250 ppm | n.t. |

*not tested

Table 18. IPD099 and IPD111 proteins and their minimal inhibitory concentrations on insect targets based on overlay artificial diet bioassays.

TABLE 18

| Protein | WCRW | | CEW | ECB | FAW | SBL | VBC |
|---|---|---|---|---|---|---|---|
| IPD099-1Aa/ | ~15/15/15 | μg/cm² | >15/15/15 | >15/15/15 | >15/15/15 | >15/15/15 | >15/15/15 |
| IPD099-2Aa/ | | | μg/cm² | μg/cm² | μg/cm² | μg/cm² | μg/cm² |
| IPD099-3Aa | | | | | | | |
| IPD099-2Aa | ~30 | μg/cm² | n.t.* | n.t. | n.t. | n.t. | n.t. |
| IPD111Aa | 74 | μg/cm² | n.t. | n.t. | n.t. | n.t. | n.t. |

*not tested

Table 19. IPD095 and IPD106 proteins active against WCRW when assayed as unpurified protein in crude E. coli lysates after expression in E. coli.

TABLE 19

| Protein | WCRW |
|---|---|
| IPD095-1Aa/IPD095-2Aa | active |
| IPD106-1Aa/IPD106-2Aa | active |

### Example 9

### Agrobacterium-Mediated Stable Transformation of Maize

[0455] For Agrobacterium-mediated maize transformation of insecticidal polypeptides, the method of Zhao is employed (U.S. Pat. No. 5,981). Briefly, immature embryos are isolated from maize and the embryos contacted with an Agrobacterium Suspension, where the bacteria were capable of transferring a polynucleotide encoding an insecticidal polypeptide of the disclosure to at least one cell of at least one of the immature embryos (step 1: the infection step). In this step the immature embryos are immersed in an Agrobacterium suspension for the initiation of inoculation. The embryos are co-cultured for a time with the Agrobacterium (step 2: the co-cultivation step). The immature embryos are cultured on solid medium with antibiotic, but without a selecting agent, for Agrobacterium elimination and for a resting phase for the infected cells. Next, inoculated embryos are cultured on medium containing a selective agent and growing transformed callus is recovered (step 4: the selection step). The immature embryos are cultured on solid medium with a selective agent resulting in the selective growth of transformed cells. The callus is then regenerated into plants (step 5: the regeneration step), and calli grown on selective medium are cultured on solid medium to regenerate the plants.

[0456] For detection of the insecticidal polypeptide in leaf tissue 4 lyophilized leaf punches/sample are pulverized and resuspended in 100 μL PBS buffer containing 0.1% TWEEN™ 20 (PBST), 1% beta-mercaoptoethanol containing 1 tablet/7 mL complete Mini proteinase inhibitor (Roche 1183615301). The suspension is sonicated for 2 min and then centrifuged at 4° C., 20,000 g for 15 min. To a supernatant aliquot ⅓ volume of 3× NuPAGE® LDS Sample Buffer (Invitrogen™ (CA, USA), 1% B-ME containing 1 tablet/7 mL complete Mini proteinase inhibitor was added. The reaction is heated at 80° C. for 10 min and then centrifuged. A supernatant sample is loaded on 4-12% Bis-Tris Midi gels with MES running buffer as per manufacturer's (Invitrogen™) instructions and transferred onto a nitrocellulose membrane using an iBlot® apparatus (Invitrogen™). The nitrocellulose membrane is incubated in PBST containing 5% skim milk powder for 2 hours before overnight incubation in affinity-purified rabbit anti-insecticidal polypeptide in PBST overnight. The membrane is rinsed three times with PBST and then incubated in PBST for 15 min and then two times 5 min before incubating for 2 hours in PBST with goat anti-rabbit-HRP for 3 hours. The detected proteins are visualized using ECL Western Blotting Reagents (GE Healthcare cat #RPN2106) and Kodak® Biomax® MR film. For detection of the insecticidal protein in roots the roots are lyophilized and 2 mg powder per sample is suspended in LDS, 1% beta-mercaptoethanol containing 1 tablet/7 mL Complete Mini proteinase inhibitor is added. The reaction is heated at 80° C. for 10 min and then centrifuged at 4° C., 20,000 g for 15 min. A supernatant sample is loaded on 4-12% Bis-Tris Midi gels with MES running buffer as per manufacturer's (Invitrogen™) instructions and transferred onto a nitrocellulose membrane using an iBlot® apparatus (Invitrogen™). The nitrocellulose membrane is incubated in PBST containing 5% skim milk powder for 2 hours before overnight incubation in affinity-purified polyclonal rabbit anti-insecticidal antibody in PBST overnight. The membrane is rinsed three times with PBST and then incubated in PBST for 15 min and then two times 5 min before incubating for 2 hours in PBST with goat anti-rabbit-HRP for 3 hrs. The antibody bound insecticidal proteins are detected using ECL™ Western Blotting Reagents (GE Healthcare cat #RPN2106) and Kodak® Biomax® MR film.

[0457] Transgenic maize plants positive for expression of the insecticidal proteins are tested for pesticidal activity using standard bioassays. Such methods include, for example, root excision bioassays and whole plant bioassays. See, e.g., US Patent Application Publication Number US 2003/0120054.

### Example 10

### Expression Vector Constructs for Expression of Insecticidal Polypeptides in Plants

[0458] The plant expression vectors, can be constructed to include a transgene cassette containing the coding sequence pf the insecticidal polypeptide, under control of the Mirabilis Mosaic Virus (MMV) promoter [Dey N and Maiti I B, 1999, Plant Mol. Biol. 40(5):771-82] in combination with an enhancer element. These constructs can be used to generate transgenic maize events to test for efficacy against corn rootworm provided by expression of the insecticidal polypeptide of the disclosure.

[0459] T0 greenhouse efficacy of the events can be measured by root protection from Western corn rootworm. Root protection is measured according to the number of nodes of roots injured (CRWNIS=corn rootworm node injury score) using the method developed by Oleson, et al. (2005) [J. Econ Entomol. 98(1):1-8]. The root injury score is measured from “0” to “3” with “0” indicating no visible root injury, “1” indicating 1 node of root damage, “2” indicating 2 nodes or root damage, and “3” indicating a maximum score of 3 nodes of root damage. Intermediate scores (e.g. 1.5) indicate additional fractions of nodes of damage (e.g. one and a half nodes injured).

[0460] The above description of various illustrated embodiments of the disclosure is not intended to be exhaustive or to limit the scope to the precise form disclosed. While specific embodiments of and examples are described herein for illustrative purposes, various equivalent modifications are possible within the scope of the disclosure, as those skilled in the relevant art will recognize. The teachings provided herein can be applied to other purposes, other than the examples described above. Numerous modifications and variations are possible in light of the above teachings and, therefore, are within the scope of the appended claims.

[0461] These and other changes may be made considering the above detailed description. In general, in the following claims, the terms used should not be construed to limit the scope to the specific embodiments disclosed in the specification and the claims.

[0462] The entire disclosure of each document cited (including patents, patent applications, journal articles, abstracts, manuals, books or other disclosures) in the Background, Detailed Description, and Examples is herein incorporated by reference in their entireties.

[0463] Efforts have been made to ensure accuracy with respect to the numbers used (e.g. amounts, temperature, concentrations, etc.) but some experimental errors and deviations should be allowed for. Unless otherwise indicated, parts are parts by weight, molecular weight is average molecular weight; temperature is in degrees centigrade; and pressure is at or near atmospheric.

That which is claimed is:

1. A recombinant insecticidal polypeptide selected from:
a) a polypeptide comprising an amino acid sequence having at least 80% sequence identity to SEQ ID NO: 1 or fragments thereof having insecticidal activity;
b) a polypeptide comprising an amino acid sequence having at least 80% sequence identity to SEQ ID NO: 2 or fragments thereof having insecticidal activity;
c) a polypeptide comprising an amino acid sequence having at least 80% sequence identity to SEQ ID NO: 27 or fragments thereof having insecticidal activity;
d) a polypeptide comprising an amino acid sequence having at least 80% sequence identity to SEQ ID NO: 28 or fragments thereof having insecticidal activity;
e) a polypeptide comprising an amino acid sequence having at least 80% sequence identity to SEQ ID NO: 121 or fragments thereof having insecticidal activity;
f) a polypeptide comprising an amino acid sequence having at least 80% sequence identity to SEQ ID NO: 136 or fragments thereof having insecticidal activity;
g) a polypeptide comprising an amino acid sequence having at least 80% sequence identity to SEQ ID NO: 137 or fragments thereof having insecticidal activity;
h) a polypeptide comprising an amino acid sequence having at least 80% sequence identity to SEQ ID NO: 138 or fragments thereof having insecticidal activity;
i) a polypeptide comprising an amino acid sequence having at least 80% sequence identity to SEQ ID NO: 332 or fragments thereof having insecticidal activity;
j) a polypeptide comprising an amino acid sequence having at least 80% sequence identity to SEQ ID NO: 333 or fragments thereof having insecticidal activity;
k) polypeptide comprising an amino acid sequence having at least 80% sequence identity to SEQ ID NO: 350 or fragments thereof having insecticidal activity;
l) a polypeptide comprising an amino acid sequence having at least 80% sequence identity to SEQ ID NO: 377 or fragments thereof having insecticidal activity;
m) a polypeptide comprising an amino acid sequence having at least 80% sequence identity to SEQ ID NO: 453 or fragments thereof having insecticidal activity; and
n) a polypeptide comprising an amino acid sequence having at least 80% sequence identity to SEQ ID NO: 529 or fragments thereof having insecticidal activity
wherein the insecticidal polypeptide is operably joined to a heteroloqous signal sequence or a transit sequence.

2. The recombinant insecticidal polypeptide of claim 1, wherein the insecticidal polypeptide is selected from:
a) a polypeptide comprising an amino acid sequence having at least 95% sequence identity to SEQ ID NO: 1 or fragments thereof having insecticidal activity;
b) a polypeptide comprising an amino acid sequence having at least 95% sequence identity to SEQ ID NO: 2 or fragments thereof having insecticidal activity;
c) a polypeptide comprising an amino acid sequence having at least 95% sequence identity to SEQ ID NO: 27 or fragments thereof having insecticidal activity;
d) a polypeptide comprising an amino acid sequence having at least 95% sequence identity to SEQ ID NO: 28 or fragments thereof having insecticidal activity;
e) a polypeptide comprising an amino acid sequence having at least 95% sequence identity to SEQ ID NO: 121 or fragments thereof having insecticidal activity;
f) a polypeptide comprising an amino acid sequence having at least 95% sequence identity to SEQ ID NO: 136 or fragments thereof having insecticidal activity;
g) a polypeptide comprising an amino acid sequence having at least 95% sequence identity to SEQ ID NO: 137 or fragments thereof having insecticidal activity;
h) a polypeptide comprising an amino acid sequence having at least 95% sequence identity to SEQ ID NO: 138 or fragments thereof having insecticidal activity;
i) a polypeptide comprising an amino acid sequence having at least 95% sequence identity to SEQ ID NO: 332 or fragments thereof having insecticidal activity;
j) a polypeptide comprising an amino acid sequence having at least 95% sequence identity to SEQ ID NO: 333 or fragments thereof having insecticidal activity;
k) a polypeptide comprising an amino acid sequence having at least 95% sequence identity to SEQ ID NO: 350 or fragments thereof having insecticidal activity;
l) a polypeptide comprising an amino acid sequence having at least 95% sequence identity to SEQ ID NO: 377 or fragments thereof having insecticidal activity;
m) a polypeptide comprising an amino acid sequence having at least 95% sequence identity to SEQ ID NO: 453 or fragments thereof having insecticidal activity; and
n) a polypeptide comprising an amino acid sequence having at least 95% sequence identity to SEQ ID NO: 529 or fragments thereof having insecticidal activity;
wherein the insecticidal polypeptide is operably ioined to a heteroloqous signal sequence or a transit sequence.

3. (canceled)

4. A composition comprising at least one recombinant insecticidal polypeptide of claim 1.

5. The composition of claim 4, wherein the composition comprises: a polypeptide comprising an amino acid sequence having at least 80% sequence identity to SEQ ID NO: 1 or fragments thereof having insecticidal activity; and a polypeptide comprising an amino acid sequence having at least 80% sequence identity to SEQ ID NO: 2 or fragments thereof having insecticidal activity.

6. The composition of claim 4, wherein the composition comprises: a polypeptide comprising an amino acid sequence having at least 80% sequence identity to SEQ ID NO: 27 or fragments thereof having insecticidal activity; and a polypeptide comprising an amino acid sequence having at least 80% sequence identity to SEQ ID NO: 28 or fragments thereof having insecticidal activity.

7. The composition of claim 4, wherein the composition comprises: a polypeptide comprising an amino acid sequence having at least 80% sequence identity to SEQ ID NO: 136 or fragments thereof having insecticidal activity; a polypeptide comprising an amino acid sequence having at least 80% sequence identity to SEQ ID NO: 137 or fragments thereof having insecticidal activity; and a polypeptide comprising an amino acid sequence having at least 80% sequence identity to SEQ ID NO: 138 or fragments thereof having insecticidal activity.

8. The composition of claim 4, wherein the composition comprises: a polypeptide comprising an amino acid sequence having at least 80% sequence identity to SEQ ID NO: 332 or fragments thereof having insecticidal activity; and a polypeptide comprising an amino acid sequence having at least 80% sequence identity to SEQ ID NO: 333 or fragments thereof having insecticidal activity.

9. A recombinant polynucleotide encoding the insecticidal polypeptide of claim 1.

10. The recombinant polynucleotide of claim 9, wherein the polynucleotide has codons optimized for expression in an agriculturally important crop.

11. A DNA construct comprising the recombinant polynucleotide of claim 9 operably linked to a heterologous regulatory element.

12. A transgenic plant or plant cell comprising the polynucleotide of claim 9.

13. A transgenic plant comprising the DNA construct of claim 10.

14. A method of inhibiting growth or killing an insect pest or pest population, comprising contacting the insect pest with the insecticidal polypeptide of claim 1.

15. A method of inhibiting growth or killing an insect pest or pest population, comprising contacting the insect pest with the composition of claim 4.

16. A method of inhibiting growth or killing an insect pest or pest population comprising expressing in a plant the polynucleotide of claim 9.

17. The method of claim 14, wherein the insect pest or pest population is resistant to at least one Cry insecticidal protein.

18. A transformed prokaryotic cell comprising the polynucleotide of claim 9.

The application's sequence listing, which the Patent Office published only in electronic form, follows.

SEQUENCE LISTING (640 sequences)

SEQ ID NO: 1 - protein, 210 aa, Pseudomonas rhodesiae
MSGSSQQSVGLFPLCYQIGTQQPGAQNLALNLLVFTPEQTVSGTAAITQATNPPLDVHSDVWGEYTYMTVMKPGVSKILITVQGNQGGPSSNSIVNFKLHLVVGSDWKAGVANYEYFNGQRWVKVNAPAHLVESVPSRAYPLPLEPGPVILPYPPIMPLYAAPIQSAIASGDLAQMKNLASLAKQQLDQQPQLQSALEAAKGEISRLERS

SEQ ID NO: 2 - protein, 193 aa, Pseudomonas rhodesiae
MSIGLFHTRLNVSSSLIGAPVLTLDLLVDTVNKKVSGVASIFQSTYPPLNFRARVWGEYSEAKLTADTENHIILTLDGSPSGPYSQIAQTFDLRGILGADWASGFADYKYYDQDHWTTVRHAAVSQAPAQHPEHPSHVVRPLYAVAVQQAQASGDLAQLKTVVSQGEQQLANSGALRSALEQLQAEITRLEAR

SEQ ID NO: 3 - protein, 210 aa, Pseudomonas rhodesiae
MSGSSQQSVGLFPLCYQIGTQQPGAQSLALNLLVFTLEQTVSGTAAITQATNPPLDVHSDVWGEYTYMTVMKPGVSKILITVQGNQGGPSSNSIENFKLHLVVGSDWKAGMANYEYFNGQRWVKVNAPAHLVESVPSKAYLPPLEPGPVILPYPPIMPLYAAPIQSAIASGDLAQMKNLASLATQQLDQQPQLQSALEAAKGEISRLERR

SEQ ID NO: 4 - protein, 193 aa, Pseudomonas rhodesiae
MSIGLFHTRLNVSSSLLGAPVLTLDLLVDTVNKKVSGIASIFQSTYPPLNFRARVWGEYSEAKLTADTENHIILTLDGSPSGPNSNIAQTFDLRGILGADWASGFADYKYYDQDHWTTVRHAAVSQAPAQHPEHPSHVVRPLYAVAVQQAQASGDLAQLKSVVSQGEQQLANSGALRSALEQLQAEIARLEAR

SEQ ID NO: 5 - protein, 211 aa, Pseudomonas frederiksbergensis
MSGSTQQSVGLFPLCYRIGTSAPGAQSLALNLLVFTPEQTVSGTAAITQATNPPLDVHSDVWGEYTYLTVMKPGVSKILITAQGNNGGPGSNSIVNFKLHLVVGSDWREGVANYEYFNGQRWVKVTAPAHLVESVPSNAYKSAPLEPGPVIPAYPPIMPLYAAPIQSAIASGDLAQMKNLARLAQQQLDQQPQLQSALETAKGEISRQERR

SEQ ID NO: 6 - protein, 193 aa, Pseudomonas frederiksbergensis
MSIGLFHTRLNVNNHLLGAPVLTLDLLVDTVNKKVSGVASIYQSTYPPLNFRARVWGSYSEAKLIPEAESHILLSLDGSPSGPYSQIAQTFDLRGILGADWASGFADYKYFDQDHWTTVRHAAVTQAPVIVRPEHPHHAVPLYAVAVQQAQASGDLAQLKAVVSQGEQQLAHSGALRNALDQLNAEIARLEAR

SEQ ID NO: 7 - protein, 212 aa, Pseudomonas frederiksbergensis
MSGSTQQSVGLFPLCYRIGTSAPGAQSLALNILVFTPDETVSGTAAITQATNPPLDVYSDVWGEYTYLTVMSPGVSKILITAQGNHGGPGSNSIVNFKLQLVVGTDWKEGVANYTYYDGQRWIEVNNAPAHLVEVSSSAFLPLEPGPVIPPQSSYPPIMPLYAAPIQSAIASGDLAQMKNLSRLAQQQLDQQPQLQSALETAKGEISRQERR

SEQ ID NO: 8 - protein, 193 aa, Pseudomonas frederiksbergensis
MSIGLFHTRLNVSNHLLGAPVLTLDLLVDTVKKKVSGVASIFQSTYPPLNFRARVWGEYSEVKLVPTAESHIILTLAGSPSGPLSQIAQTFGLKGILGGDWTSGYADFKYQEQGHWHYVKHAAVSQAPVIVRPEHPHHAVPLYAVAVQQAQASGDLAQLKAVVSQGEQQLAHSGALRNALDQLNAEIARLEAR

SEQ ID NO: 9 - protein, 210 aa, Pseudomonas fluorescens
MSGSVQQQNVGLFPVSYRIGTGQPGAQSLALNLLVSTPQHEVSGTSAITQATNPPLDIDSDVWGEYTYLTVMKPGVSKILITAEGNEGGPGSNSIVNFKIQLVVGTDWREGVANYEYFDGQRWHELNNVPAHLVEVPSNVFQPFHPGPVILPHPPILPLYAAPIQSAIASGDLAQMKNLAKLAQQQLDQQPQLQKALDAAKSEISKLQAR

SEQ ID NO: 10 - protein, 192 aa, Pseudomonas fluorescens
MSIGLFHTRLIASNSLLGAPVLTLDLVVDTARKKVSGAASVFQSTWPPVNFHARVWGDYSEARLTPSTENYIILTLDGSPSGPLSQIAQTFSLKGILNDWTSGFVDYRYNEGGQWHYVRHVAVHQAPTIEPQPQERHFQPLYAVAVQQAQTSGDLVQLKTVVQQGEQQLAHHGALRSALEQLNAEIARLEAR

SEQ ID NO: 11 - protein, 214 aa, Pseudomonas protegens
MSGSTSSNLGLFPLSYRIGTSIPGAPSLTLDLLVYTPEQTVRGTSLVTQATNPPLELQSDVWGQYTYLTVMPPSTSKILVTAQGNQGGPGSNSIITFKIQLVVDHDWKNGIANYQYYNGQRWVSVENVPAHLVESVPSYAFSALPIPLEPGPVLLPYPPITPLYAAPIHGAIASGDLAQMKSLASLAQQQLEQLPQLRSALDAAKDEIGRLERR

SEQ ID NO: 12 - protein, 193 aa, Pseudomonas protegens
MQTGLFHTRIQATTGLLGAPVLTLDLLVNTVQKKVSGVARVFKSTYPPVNFFADVWGDYSQLQLHPSTEGHIILSLTGNPSGPTSQIAATFQLHGILGLDWASGFASYKYCYQGNWQDVQHATVSQASIPHPEPVPHHPVPLYAVAVQQAQSSGDLAQLKAVVRQGEQQLASGDALRSALQQLNAEIARLEAR

SEQ ID NO: 13 - protein, 209 aa, Pseudomonas protegens
MSGSISQEGLFPLSYRIGTSQPGAPTLILNLLVYTPEHSVRGTSSITQAVNPPLDLHSDVWGQYTYLTVMPPSSSKILITAQGNQGGPGSNSIINFKLHLVVSDDWKEGVANYQYYNGHSWVTVNQVPAHLQEPVQSSTLSAPHHGQPNRPLPPISALYAAPIHGAIASGDLSQMKSLHKVATQQLEQLPLIRTALEAAKAEISKHERR

SEQ ID NO: 14 - protein, 202 aa, Pseudomonas protegens
MTIGLFHTRLIVANPVIGGPVLTLDLLVNTPQKKVSGVARVTQSTSPPMHFLADVWGDYSQVKLDPSSEGHIILSLTGNPSGPTSQIAETFHLQGILGLDWASGFASYRYQYQGHWHVVQHAAVSQAPVDQAANADLAPKDDQRHLYPQPLYAVALQQAQSSGDLTRLKALVAQGEQQLANSDNLSQAVQQLQAEISRLERR

SEQ ID NO: 15 - protein, 206 aa, Chromobacterium aquaticum
MSDTAQTDIGLFPVSYLIGTGKDGAQRLTLNLLVAPPRSAVTGDAHITQTTNPPLDLHSHVHGDYTYLTVTPPSEGRILITAQGHSGSTSNFKLHLVLSQDWKQGVANYSYLNGSAWVEVENAPAKLNPELKSRYFPLPLEPGPVILPNPPINALYGVPIQSAIASGDLAHMKTLASYARQQLDAQPQLRKELDALKSEIAKLDRK

SEQ ID NO: 16 - protein, 200 aa, Chromobacterium aquaticum
MSATGLFHTRYIVSAPVLGAPVLTLDLLVNTPQKKVSGHASIFQSVSPPLQFQANVWGHYSQAKLDPSAEHHIVLSLDGSPSSPNSQIAETFHLQGILDQNWQDGHASYRFFYQGAWHTVAHAIVTEAPVVHSEQRASSKPYPHPIPLYAAALQQSRASDNLAQMKSLAGQAEEQLKQHDNIEAALKQLQSEIARLEGRH

SEQ ID NO: 17 - protein, 207 aa, Chromobacterium aquaticum
MSGNTQTEIGLFPVSYLIGNDLAGAPTLLLNLLVAPPTHSVTGSAHVVNQSLHPPLNLHSHVHGQYAYLGVVPTSEGRILISAQGHNGNTTNFKLHLVLSHDWKKGIANYSYLDGSTWVEVDNVPAKLNPELKSRYFPLPLEPGPVILPNPPINALYGVPIQSAIASGDLAHMKTLAAYAKQQLDAQPQLRKELDALKAEITKLDRK

SEQ ID NO: 18 - protein, 200 aa, Chromobacterium aquaticum
MSATGLFHVRYLISQPVLGAPVLTLDLLVDTPQKKISGHASITQSVSPPLQFQANVWGHYSQAKLDPSAEHHIVLSLDGSPSSPNSQIAETFHLQGILDQDWQDGHASYRFFYQEAWHTVAHAIVTEAPAVHPEPRAGSKPYPHPIPLYAAALQQSRVSSNLAQMKSLAGQAEEQLKQHDNIEAALKQLHAEIARLEGRH

SEQ ID NO: 19 - protein, 205 aa, Burkholderia ambifaria
MSENTRTGLFPAGYVIGTGMPGAPALRLALLVDAPEGSVVGTATIGQAVNPPVDFHADVWGNYTYMALMPPVNTRILVTLKGNDGGPTSNSIVTFRLHLVLESDWQSGVASYSFFDNGSWRAFENVPARIDREFVPLEPGPVIVEPHGGPRPLYGAPIQQAAASGDLAHMKTVAAAAKHQLESRDEIAAALAALKTEIARLEAGN

SEQ ID NO: 20 - protein, 194 aa, Burkholderia ambifaria
MSAALFPVNFRVATPAIGAPVLALSLLINTPAKKVSGVARITQTIWPPLEFSAQVWGQFSPIVLTPGGKTQLVLSLQGNPSGPTSGLAETFRLQGIVEADWKSGVASYRFFEGERWHEVDHAIMTVAGALQPFEPRHPVTPLYGVGLQQARQSGDLGRMKALARQAEQQLADAGHIEEALAGLNAEIVRLEAGR

SEQ ID NO: 21 - protein, 197 aa, Pseudomonas mosselii
SPPVMSRNSSIWPAVPWAKPWTKLLPRPKARPPRPPRKPEQTRRISMSFGLFHTRLNVSNGLLGAPILTLDLLVNTVQKKVTGRASIIQTTHPVQVFHAKVWGGYSELPFAPAGSPSIVLHLDGSPSGPLSQIAQTFHLQGLLDQGWNVGTASYRYFINGHWVDQHGRVRKAPDITHQDQPRPAERLKAAIRHLESV

SEQ ID NO: 22 - protein, 193 aa, Pseudomonas putida
MSDSLLAPSVGLFPVSYQIGNNAAGAARLQLDLLVHTPDRSVNGTAQITQAINPPLDLHLDVWGSYTYLTVQPPSDARILITAQGNQGGPHANSPVHFKFRALLDPTWQRGVADYEYFNGQRWVSVDNVPVTLEGQRIQQLANVDLHSELHNATLEAAIANGDVAQLKQLATGGLDQAIAATKSPATKAAKKA

SEQ ID NO: 23 - protein, 151 aa, Pseudomonas putida
MAIGLFHVRLNVSNGLLGAPTLTLDLLVNTVTKKVSGKARASQATYPQQPFQANVWGDYSELQFAPAGAPSIVLSLDGSPSGPLSQIAQTFHLHGLLEADWSNGSASYRYFSNGHWLDQHGRVRKAPDVTHQGRPQLAQRLKAAINQLESV

SEQ ID NO: 24 - protein, 199 aa, Pseudomonas vranovensis
MTDSVQAPVIGLFPLSYVIGTDAPGAQRLVLDLLVHPADRTLRGTAQITQSSNPPLDLHLDVWGTYSYQLFLPPSPSSILITLQGNHGGPTANSPIIFSLHLAVGTDWQKGQAGYRYLNSQGQWIVVEAPAHREDTRIKAFGDLDIPALLHATTLEAAIATGDLAHLKALAAGDAGAALNTAIDSTKSASGKAGKSSRA

SEQ ID NO: 25 - protein, 159 aa, Pseudomonas vranovensis
MPAIGLFHTRLNVRTGLLGAPVLTLDLLVNTVQKKITGVASIFAATYPPLNFHADVWGDYSDLKLGLKGEGHIVLNLTGSPSGPFSTLEQTFHLHGILSANWARGTASYRYLPLDGRPWQVVPHASVRQAPTETHQAQKDVSEHSRNRLQAAIDQLKSA

SEQ ID NO: 26 - protein, 259 aa, Pseudomonas mosselii
LKRAARQAAPRTRDGCTSRLPTAARTGQACSPRPVSHFLRLFARLRQSWLSVCHSSNAMEAIMSESLLAPSEGLFPVSYLIGTNAPGAPRLQVDLLVYTPDRSVNGHALITQTTNPPLELALDVWGTYSYLTVQPPSEGKILLTVRGNHGGPHANSPEQFELRALLDQDWQKGTASYRYNNGQRWIEVDNVPVVLELKRIQTLANVDLTTELHNATLEAVIATGDVAQLKHLASGAVGKALDQALASTKSPAAKAAKKA

SEQ ID NO: 27 - protein, 174 aa, Serratia nematodiphila
MPIKKYVILDSAPKAVGNSDFILLGLKSEGFARGCPMLFGGTADAKDGPVDGKNFALNVIKRETWEETNKNIGVEQVVRYQVYPNDISVYTSKDFTFTGKVAIGGEFAWIRKVSKGKIKTYFKNKPTATKDMFAQELYAMTLDVDIEPTDAEFEQYLSSDCLSAIYAYCKENCK

SEQ ID NO: 28 - protein, 535 aa, Serratia nematodiphila+L68
MLAKDYTSDEKRIVKNVIDRYENSGVFLIEPDDPVLTEFYDIQLKLAGVTAAAAPQFSQLWQQTKRVKRVAGRMSEANTSGAQPVYSIVRLDSTDGKRYQTDAIGSLPVQATNVTQTLGLFDGGADNVGKVEYKSDYVYTADCTIGASGDYPQSQTGDSFPVTVIYTFAQTVGQQTVYGAEIVTTQSYPKEMINDSPRNLYNQRMIKICLTRDDGDCDYRTGYDQDGTVKVPIKGNITYFGNIDLSNGKPVNASNTIYLIRTRAGGDPITPYGGYNIFNSAATRISGNNITWDLDWLKFNRVDFESGEMVYYVFKITLDVEGRSIAAFITNAPKESDPDRRLLNTVQIKPMQIIYGCLAEGTLILMQDGTEKPINALTADEFVICGNNHPRRIENITTGQEQHYIDITARDQAAREYRIKASLGHPFVTANGIFLARELTSGMCLKTRRGECEITAISLQPGELTVYNLQLGADSPLQKNQCALSTFYANGVLVGDALVQHLYEDEYHQRPKNVLKTLPTEWHQDYHNMINAADE

SEQ ID NO: 29 - protein, 174 aa, Serratia marcescens
MPIKKYVILDSAPKAVGNSDFILLGLKSEGFARGCPMLFGGTADAKDGPVDGKNFALNVIKRETWEETNQNIGVEQVVRYQVYPNDISVYTSKDFTFTGKVAIGGEFAWIRKVSKGKIKTYFKNKPTATKDMFAQELYAMTLDVDIEPTDAEFEQYLSSDCLSAIYAYCKETCK

SEQ ID NO: 30 - protein, 174 aa, Serratia marcescens
MPIKKYVILDSAPKAVGNSDFILLGLKSEGFARGCPMLFGGTADAKDGPVDGKNFALNVIKRETWEETNQNISVEQVVRYQVYPNDISVYTSKDFTFTGKVAIGGEFAWIRKVSKGKIKTYFKNKPAATKDMFAQELYAMTLDVDIEPTDAEFEQYLSSDCLSAIYAYCKETCK

SEQ ID NO: 31 - protein, 174 aa, Serratia marcescens
MPIKKYVILDSAPKAVGNSDFILLGLKNEGFARGCPMLFGGTADAKDGPVDGKNFALNVIKRETWEETNQNVGVEQVVRYQVYPNDISVYTSKDFTFTGKVAIGGEFAWIRKVSKGKIKAYFKNKPTATKDMFAQELYAMTLDVDIEPTDAEFEQYLSSDCLSAIYAYCKETCK

SEQ ID NO: 32 - protein, 174 aa, Serratia marcescens
MPIKKYVILDSAPKAVGNSDFILLGLKSEGFARGCPMLFGGTADAKDGPVDGKNFALNLIKRETWEETNQNIGVKQVVRYQVYPNDISVYTSKDFTFTGKVAIGGEFAWIRKVSKGKIKTYFKNKPTATKDMFTQELYAMTLDVDIEPTDAEFEQYLSSDCLSAIYAYCKETCK

SEQ ID NO: 33 - protein, 174 aa, Serratia marcescens
MPIKKYVILDSAPKAVGNSDFILLGLKNEGFARGCPMLFGGTADAKDGPVDGKNFALNVIKRETWEETNQNIGVEQVVRYQVYPNDISVYTSKDFTFTGKVAIGGEFAWIRKVSKGKIKTYFKNKPAATKDMFAQELYAMTLDVDIEPTDAEFEQYLSSDCLSAIYAYCKETCK

SEQ ID NO: 34 - protein, 174 aa, Serratia marcescens
MPIKKYVILDSAPKAVGNSDFILLGLKSEGFARGCPMLFGGTADAKDGPVDGKNFALNVIKRETWEETNQNIGVEQVVRYQVYPNDISVYTSKDFTFSGKVAIGGEFAWIRKVSKGKIKTYFKNKPAATKDMFAQELYAMTLDVDIEPTDAEFEQYLSSDCLSAIYAYCKENCK

SEQ ID NO: 35 - protein, 174 aa, Unknown
  Spicies not identified
MPIKKYVILDSAPKAVGNSDFILLGLKNEGFARGCPMLFGGTADAKDGPVDGKNFALNVIKRETWEETNQNIGVEQVVRYQVYPNDISVYTSKDFTFTGKVAIGGEFAWIRKVSKGKIKAYFKNKPAATKDMFAQELYAMTLDVDIEPTDAEFEQYLSSDCLSAIYAYCKETCK

SEQ ID NO: 36 - protein, 174 aa, Unknown
  Spicies not identified
MPIKKYVILDSAPKAVGNSDFILLGLKSEGFARGCPMLFGGTADAKDGPVDGKNFALNVIKRETWEETNQNIGVEQVVRYQVYPNDISVYTSKDFTFTGKVAIGGEFAWIRKVSKGKIKTYFKNKPTATKDMFAQELYAMTLDVDIEPTDAEFEQYLSSDCLSAIYAYCKENCK

SEQ ID NO: 37 - protein, 174 aa, Unknown
  Spicies not identified
MPIKKYVILDSAPKAVGNSDFILLGLKSEGFARGCPMLFGGTADAKDGPVDGKNFALNVIKRETWEETNQNIGVEQVVRYQVYPNDISVYTSKDFTFTGKVAIGGEFAWIRKVSKGKIKTYFKNKPAATKDMFAQELYAMTLDVDIEPTDAEFEQYLSSDCLSAIYAYCKETCK

SEQ ID NO: 38 - protein, 174 aa, Unknown
  Spicies not identified
MPIKKYVILDSAPKAVGNSDFILLGLKNEGFARGCPMLFGGTADARDGPVDGKNFALNVIKRETWEETNQNIGVEQVVRYQVYPNDISVYTSKDFTFTGKVAIGGEFAWIRKVSKGKIKTYFKNKPAATKDMFAQELYTMTLDVDIEPTDAEFEQYLSSDCLSAIYAYCKETCK

SEQ ID NO: 39 - protein, 174 aa, Unknown
  Spicies not identified
MPIKKYVILDSAPKAVGNSDFILLGLKNEGFARGCPMLFGGTADARDGPVDGKNFALNVIKRETWEETNQNIGVEQVVRYQVYPNDISVYTSKDFTFTGKVAIGGEFAWIRKVSKGKIKTYFKNKPAATKDMFAQELYAMTLDVDIEPTDAEFEQYLSSDCLSAIYAYCKETCK

SEQ ID NO: 40 - protein, 174 aa, Serratia species
MPIKKYVILDSAPKAVGNSDFILLGLKNEGFARGCPMLFGGTADAKDGPVDGKNFALNVIKRETWEETNQNIGVEQVVRYQVYPNDISVYTSKDFTFTGKVAIGGEFAWIRKVSKGKIKAYFKNKPTATKDMFAQELYAMTLDVDIEPTDAEFEQYLSSDCLSAIYAYCKETCK

SEQ ID NO: 41 - protein, 174 aa, Serratia proteamaculans
MPIKKYVILDSNPAAVGNNDFILLGLKNTGFARGCPMLFGGTADAKDGPVDGKYFALNVIKRETWEETLHNIEVQQVVRYQAYPNDISFYTSKDFTFTGKVALGGEFAWIRKVSKGKLKAYFKSKPSATKAMFAQELYGMTLDPDIDPTDGEFEQYLGSDSLSAIYSYCKETCK

SEQ ID NO: 42 - protein, 174 aa, Serratia liquefaciens
MPIKKYVILDSNPAAVGNNDFIILGLKNTGFARGFPMLFGGTADAKDGPVDGKYFALNVIKRETWEETLHNIEVQQVVRYQAYPNDISFYTSKDFTFTGKVALGGEFAWIRKVSKGKLKAYFKSKPSATKAMFAQELYGMTLDPDIDPTDGEFEQYLGSDSLSAIYSYCKETCK

SEQ ID NO: 43 - protein, 174 aa, Serratia plymuthica
MPIKKYVILDSNPKAVGNNDFILLGLKATGFARGCPMLFGGTADAKDGPVDGKNFALNVIKRETWEETLKNIEVNQVVRYQAYPNDISVYTSNDFIFTGQVTLGGEFAWIRKVSKGKLKAYFQNKPSATKDMFAQELFSMTADPNIDPTEGEFEAYLGSDSLSAIYSYCKATCK

SEQ ID NO: 44 - protein, 174 aa, Serratia species S4
MPIKKYVILDSNPAAVGNDDFILLGLKNEGFARGCPMLFGGTADAKDGPVDGKNFALNVIKRETWEETLHNIEVEQVVRYKVFPNDITFYTSKVFTFNGTVKLGGEFAWIRKVSKGKLKAYFKSKPSATKDMFAQELYAMTEDPKIIPTDGEFEEYLGSDTLSAIYAYCKETCK

SEQ ID NO: 45 - protein, 174 aa, Serratia plymuthica S13
MPIKKYVILDSNPKAVGNNDFILLGLKAAGFARGCPMLFGGTADAKDGPVDGKNFALNVIKRETWEETLKNIEVNQVVRYQAYPNDISVYTSNDFIFTGQVTLGGEFAWIRKVSKGKLKAYFQNKPSATKDMFAQELFSMTADPNIDPTEGEFEAYLGSDSLSAIYSYCKATCK

SEQ ID NO: 46 - protein, 174 aa, Serratia proteamaculans
MPIKKYVILDSNPAAVGNDDFILLGLKNEGFARGCPMLFGGTADAKDGPVDGKNFALNVIKRETWEETLHNIEVEQVVRYKVFPNDITFYTSKVFTFNGTVKLGGEFAWIRKVSKGKLKAYFKNKPSATKDMFAQELYAMTLDPHIEPTDTQFEEYLGSDTLSAIYAYCKETCK

SEQ ID NO: 47 - protein, 174 aa, Serratia liquefaciens
MPIKKYVILDSNPAAVGNNDFILLGLKNTGFARGCPMLFGGTADAKDGPVDGKYFALNVIKRETWEETLHNIEVQQVVRYQVYPNDISFYTSKDFIFTGKVALGGEFAWIRKVSKGKLKTYFKSKPSATKAMFAQELYGMTLDPDIDPTDGEFEQYLGSDSLSAIYSYCKETCK

SEQ ID NO: 48 - protein, 174 aa, Unknown
  Spicies not identified
MPIKKYVILDSDPAAVGNDDFILLGLKNEGFARGCPMLFGGTADAKDGPVDGKNFALNVIKRETLEETLKNIEVEQVVRYKVFPNDIIFYTSKVFLFTGKVALGGEFAWIRKVSKGKLKYYFKNKPSATKDMFAQELYNMTADPDVDPTDTQFAEYLGSDTLSAIYAYCKETCK

SEQ ID NO: 49 - protein, 174 aa, Unknown
  Spicies not identified
MPIKKYVILDSNPSAVGNDDFILLGLKNEGFARGCPMLFGGTADAKDGPIDGKNFALNVIKRETWEETLHNIEVQQVVRYKVFPNDITFYTSKVFTFTGTVALGGEFAWIRKVSKGKLKTYFKNKPSATKDMFAQELYAMTLDPHIDPTDAQFEEYLGSDTLSVIYAYCKETCK

SEQ ID NO: 50 - protein, 174 aa, Unknown
  Spicies not identified
MPIKKYVILDSNPAAVGNNDFILLGLKNTGFARGCPMLFGGTADAKDGPVDGKYFTLNVIKRETWEETLHNIEVQQVVRYQAYPNDISFYTSKDFTFTGKVALGGEFAWIRKVSKGKLKAYFKSKPSATKAMFAQELYGMTLDPDIDPTDGEFEQYLGSDSLSAIYSYCKETCK

SEQ ID NO: 51 - protein, 174 aa, Unknown
  Spicies not identified
MPIKKYVILDSNPKAVGNNDFILLGLKATGFARGCPMLFGGTVDAKDGPVDGKNFALNVIKRETWEETLKNIEVNQVVRYQAYPNDISVYTSNDFIFPGQVTLGGEFAWIRKVSKGKLKAYFQNKPSATKDMFAQELFSMTADPNIDPTEGEFEAYLGSDSLSAIYSYCKATCK

SEQ ID NO: 52 - protein, 174 aa, Unknown
  Spicies not identified
MPIKKYVILDSNPKAVGNNDFILLGLKATGFARGCPMLFWGTADAKDGPVDGKNFALNVIKRETWEETLKNIEVNQVVRYQAYPNDISVYTSNDFIFTGQVTLGGEFAWIRKVSKGKLKAYFQNKPSATKDMFAQELFSMTADPNIDPTEGEFEAYLGSDSLSAIYSYCKATCK

SEQ ID NO: 53 - protein, 174 aa, Serratia plymuthica
MPIKKYVILDSNPKTVGNNDFILLGLKATGFARGCPMLFGGTADAKDGPVDGKNFALNVIKRETWEETLKNIEVNQVVRYQAYPNDISVYTSNDFIFTGQVTLGGEFAWIRKVSKGKLKAYFQNKPSATKDMFAQELFSMTADPNIDPTEGEFEAYLGSDSLSAIYSYCKATCK

SEQ ID NO: 54 - protein, 174 aa, Serratia plymuthica
MPIKKYVILDSNPKAVGNNDFILLGLKATGFARGCPMLFGGTADAEDGPVDGKNFALNVIKRETWEETLKNIEVNQVTRYQTYPNEISVYTSDDFTFTGQVTLNGEFAWIRKVSKGKLKAYFQNKPSATQDMFAQELFIMTADDNIQPTDGEFDAYLGSDSLSAIYSYCKATCK

SEQ ID NO: 55 - protein, 174 aa, Serratia plymuthica
MPIKKYVILDSNPKAVGNNDFILLGLKAIGFARGCPMLFGGTADVKDGPVDGKNFALNVIKRETWEETLENIEVNQVVRYQTYPDEISVYTSNDFIFTGQVTLGGEFAWIRKVSKGKLTAYFKNKPSATKDMFAQELFSMTADPNIDPTEGEFEAYLGSSSLSALYSYCKETCK

SEQ ID NO: 56 - protein, 174 aa, Unknown
  Spicies not identified
MPIKKYVILDSDPNAVGNNDFILLGLKAIGFARGCPMLFGGTADAEDGPVDGKDFALNVIKRETWEETLENIEVNQVARYQTYPNEISVYTSNDFTFTGQVTLNGEFAWIRKVSKGKLTTYFQNKPSATKDMFAQELFSMTADSNIQPTDGEFEAYLGSNSLSALYSYCKETCK

SEQ ID NO: 57 - protein, 174 aa, Serratia plymuthica
MPIKKYVILDSNPKAVGNNDFILLGLKATGFARGCPMLFGGTADAEDGPVDGKNFALNVIKRETWEETLKNIEVNQVTRYQTYPNEISIYTSDDFTFTGQVTLNGEFAWIRKVSKGKLKAYFQNKPSATQDMFAQELFIMTADDNIQPTDGEFDAYLGSDSLSAIYSYCKATCK

SEQ ID NO: 58 - protein, 180 aa, Leminorella grimontii
MSTKNYVILDTNPRSNQNDDFILLGLKNQGFARGCPMLFGGTADAKKDGRPDEKDFALKVIRREVREETGNRIIVNQIGKRIHCAAGEDISVYTSHDFHFDGRVNLGTAGEFAWIRKVSKGKLSALFEGEEIKNCEQFGRHLFGMTLDESIDPTYEQYHDEYLPSESLKALYKYCLALFS

SEQ ID NO: 59 - protein, 535 aa, Serratia marcescens
MLAKDYTSDEKRIVKNVIDRYENSGVFLIEPGDSVLTEFYDIQLKLAGVTAAAAPQFSQLWQQTKRVKRVAGRMSEANTGGAQPVYSIVRLDSTDGKRYQTDAIGSLPVQATNVTQTLGLFDGGADNVGKVEYKSDYVYTADCTIGASGDYPQSQTGGSFPVTVIYTFAQTVGQQTVYGAEIVTTQSYPKEMINDSPRNLYNQRMIKICLTRDDGDCDYRTGYDQDGTVKVPIKGNITYFGNIDLSNGKPVNASNTIYLIRTRAGGDPITPYGGYNIFNSAATRISGNNITWDLDWLKFNRVDFESGEMVYYVFKITLDVEGRSIAAFITNAPKESDPDRRLLNTVQIKPMQIIYGCLAEDTLILMQDGTEKPINALTTDEFVICGNNQPKRIENITTGQEQHYIDITARDQAAREYRIKASLGHPFVTANGIFLARELTSGMCLKTRHGECEITAISLQPGELTVYNLQLGADSPLQKNQCAFSTFYANGVLVGDALVQHLYEDEYHQRPKNVLKTLPAEWHQDYHNMINAADE

SEQ ID NO: 60 - protein, 535 aa, Serratia nematodiphila
MLAKDYTSDEKRIVKNVIDRYENSGVFLIEPGDPVLTEFYDIQLKLAGVTAAAAPQFSQLWQQTKRVKRVAGRMSEANTSGAQPVYSIVRLDSTDGKRYQTDAIGSLPVQATNVTQTLGLFDGGADNVGKVEYKSDYVYTADCTIGASGDYPQSQTGGSFPVTVIYTFAQTVGQQTVYGAEIVTTQSYPKEMINDSPRNLYNQRMIKICLTRDDGDCDYRTGYDQDGTVKVPIKGNITYFGNIDLSNGKPANASNTIYLIRTRAGGDPITPYGGYNIFNSAATRISGNNITWDLDWLKFNRVDFESGEMVYYVFKITLDVEGRSIAAFITNAPKESDPDRRLLNTVQIKPMQIIYGCLAEGTLILMQDGTEKPINALTADEFVICGNNHPRRIENITTGQEQHYIDITARDQAAREYRIKASLGHPFVTANGIFLARELTSGMCLKTRHGECEITAISLQPGELTVYNLQLGADSPLQKNQCALSTFYANGVLVGDALVQHLYEDEYHQRPKNVLKTLPDEWHQDYHNMINAAGE

SEQ ID NO: 61 - protein, 535 aa, Serratia marcescens
MLAKDYTSDEKRIVKNVIDRYENSGVFLIEPGDPVLTEFYDIQLKLAGVTAAAAPQFSQLWQQTKRVKRVAGRMSEANTSGAQPVYSIVRLDSTDGKRYQTDAIGSLPVQATNVTQTLGLFDGGADNVGKVEYKSDYVYTADCTIGASGDYPQSQTGGSFPVTVIYTFAQTVGQQTVYGAEIVTTQSYPKEMINDSPRNLYNQRMIKICLTRDDGDCDYRTGYDQDGTVKVPIKGNITYFGNIDLSNGKPVNASNTIYLIRTRAGGDPITPYGGYNIFNSAATRISGNNITWDLDWLKFNRVDFESGEMVYYVFKITLDVEGRSIAAFITNAPKESDPDRRLLNTVQIKPMQIIYGCLAEGTLILMQDGTEKPINALTADEFVICGNNHPRRIENITTGQEQHYIDITARDQAAREYRIKASLGHPFVTANGIFLARELTSGMCLKTRHGECEITAISLQPGELTVYNLQLGADSPLQKNQCALSTFYANGVLVGDALVQHLYEDEYHQRPKNVLKTLPAEWHQDYHNMINAADE

SEQ ID NO: 62 - protein, 535 aa, Serratia marcescens
MLAKDYTSDEKRIVKNVIDRYENSGVFLIEPDDPVLTEFYDIQLKLAGVTAAAAPQFSQLWQQTKRVKRVAGRMSEANTSGAQPVYSIVRLDSTDGKRYQTDAIGSLPVQATNVTQTLGLFDGGADNVGKVEYKSDYVYTADCTIGASGDYPQSQTGGSFPVTVIYTFAQTVGQQTVYGAEIVTTQSYPKEMINDSPRNLYNQRMIKICLTRDDGDCDYRTGYDQDGTVKVPIKGNITYFGNIDLSNGKPVNASNTIYLIRTRAGGDPITPYGGYNIFNSAATRISGNNITWDLDWLKFNRVDFESGEMVYYVFKITLDVEGRSIAAFITNAPKESDPDRRLLNTVQIKPMQIIYGCLAEGTLILMQDGTEKPINALTADEFVICGNNHPRRIENITTGQEQHYIDITARDQAAREYRIKASLGHPFVTANGIFLARELTSGMCLKTRHGECEITAISLQPGELTVYNLQLGADSPLQKNQCALSTFYANGVLVGDALVQHLYEDEYHQRPKNVLKTLPAEWHQDYHNMINAADE

SEQ ID NO: 63 - protein, 535 aa, Serratia marcescens
MLAKDYTSDEKRIVKNVIDRYENSGVFLIEPGDPVLTEFYDIQLKLAGVTAAAAPQFTQLWQQTKRVKRVAGRMSEANTSGAQPVYSIVRLDSTDGKRYQTDAIGSLPVQATNVTQTLGLFDGGADNVGKVEYKSDYVYTADCTIGASGDYPQSQTGGSFPVTVIYTFAQTVGQQTVYGAEIVTTQSYPKEMINDSPRNLYNQRMIKICLTRDDGDCDYRTGYDQDGTIKVPIKGNITYFGNIDLSNGKPVNASNTIYLIRTRAGGDPITPYGGYNIFNSAATRISGNNITWDLDWLKFNRVDFESGEMVYYVFKITLDVEGRSIAAFITNAPKESDPDRRLLNTVQIKPMQIIYGCLAEDTLILMQDGTEKPINALTADEFVICGNNHPRRIENITTGQEQHYIDITARDQAACEYRIKASLGHPFVTANGICLARELTSGMRLKTRHGECEITALSLQSGELTVYNLQLSADSPLQKTQCALSIFYANGVLVGDALVQHLYEDEYHQRPKNVLKTLPAEWHQDYHNMINAAEE

SEQ ID NO: 64 - protein, 535 aa, Serratia marcescens
MLAKDYTSDEKRIVKNVIDQYENSGVFLIEPGDPVLTEFYDIQLKLAGVTAAAAPQFTQLWQQTKRVKRVAGRMSEANTSGAQPVYSIVRLDSTDGKRYQTDAIGSLPVQATNVTQTLGLFDGGADNVGKVEYKSDYVYTADCTIGASGDYPQSQTGGSFPVTVIYTFAQTVGQQTVYGAEIVTTQSYPKEMINDSPRNLYNQRMIKICLTRDDGDCDYRTSYDQDGTVKVPIKGNITYFGNIDLSNGKPVNASNTIYLIRTRAGGDPITPYGGYNIFNSAATRISGNNITWDLDWLKFNRVDFESGELVYYVFKITLDVEGRSIAAFITNAPKESDPDRRLLNTVQIKPMQIIYGCLAADTIILMQDGTEKPINDLDVDEFVICGNNQPRRIENITTGQEQHYIDITARDKTAREYRIKASLGHPFVTANGIFLARELTSGMRLMTRQGECEITALSLQSGELTVYNLQLSADSPLQKAQCALSTFYANGVLVGDALVQHLYEDEYHQRPKNVLKTLPAEWHQDYHNMINAAEE

SEQ ID NO: 65 - protein, 535 aa, Serratia marcescens
MLAKDYTSDEKRIVKNVIDRYENSGVFLIEPGDPVLTEFYDIQLKLAGVTAAAAPQFSQLWQQTKRVKRVAGRMSEANTGGAQPVYSIVRLDSTDGKRYQTDAIGSLPVQATNVTQTLGLFDGGADNVGKVEYKSDYVYTADCTIGASGDYPQSQTGGSFPVTVIYTFAQTVGQQTVYGAEIVTTQSYPKEMINDSPRNLYNQRMIKICLTRDDGDCDYRTGYDQDGTVKVPIKGNITYFGNIDLSNGKPVNASNTIYLIRTRAGGDPITPYGGYNIFNSAATRISGNNITWDLDWLKFNRVDFESGEMVYYVFKITLDVEGRSIAAFITNAPKESDPDRRLLNTVQIKPMQIIYGCLAEDTLILMQDGTEKPINALTTDEFVICGNNQPKRIENITTGQEQHYIDITARDQAAREYRIKASLGHPFVTANGIFLARELTSGMCLKTRHGECEITAISLQPGELTVYNLQLGADSPLQKNQCALSTFYANGVLVGDALVQHIYEDEYHQRPKNVLKTLPAEWHQDYHNMINAADE

SEQ ID NO: 66 - protein, 535 aa, Serratia marcescens
MLAKDYTSDEKRIVKNVIDRYENSGVFLIEPDDPVLTEFYDIQLKLAGVTAAAAPQFSQLWQQTKRVKRVAGRMSEANTSGAQPVYSIVRLDSTDGKRYQTDAIGSLPVQATNVTQTLGLFDGGADNVGKVEYKSDYVYTADCTIGASGDYPQSQTGGSFPVTVIYTFAQTVGQQTVYGAEIVTTQSYPKEMINDSPRNLYNQRMIKICLTRDDGDCDYRTGYDQDGTVKVPIKGNITYFGNIDLSNGKPVNASNTIYLIRTRAGGDPITPYGGYNIFNSAATRISGNNITWDLDWLKFNRVDFESGEMVYYVFKITLDVEGRSIAAFITNAPKESDPDRRLLNTVQIKPMQIIYGCLAEGTLILMQDGTEKPINALTADEFVICGNNHPRRIENITTGQEQHYIDITARDQTAREYRIKASLGHPFVTANGIFLARELTSGMCLKTRHGECEITAISLQLGELTVYNLQLGADSPLQKNQCALSTFYANGVLVGDALVQHIYEDEYHQRPKNVLKTLPAEWHQDYHNMINAADE

SEQ ID NO: 67 - protein, 535 aa, Serratia marcescens
MLAKDYTSDEKRIVKNVIDRYENSGVFLIEPGDPVLTEFYDIQLKLAGVTAAAAPQFTQLWQQTKRVKRVAGRMSEANTSGAQPVYSIVRLDSTDGKRYQTDAIGSLPVQATNVTQTLGLFDGGADNVGKVEYKSDYVYTADCTIGASGDYPQSQTGGSFPVTVIYTFAQTVGQQTVYGAEIVTTQSYPKEMINDSPRNLYNQRMIKICLTRDDGDCDYRTGYDQDGTVKVPIKGNITYFGNIDLSNGKPVNASNTIYLIRTRAGGDPITPYGGYNIFNSAATRISGSNITWDLDWLKFNRVDFESGEMVYYVFKITLDVEGRSIAAFITNAPKESDPDRRLLNTVQIKPMQIIYGCLAEDTLILMQDGTEKPINALTADEFVICGNNHPRRIENITTGQEQHCIDITARDQAAGEYRIKASLGHPFVTANGICLARELTSGMRLKTRHGECEITALSLQPGELTVYNLQLSADSPLQKTQCALSTFYANGVLVGDALVQHLYEDEYHQRPKNVLKTLPAEWHQDYHNMINAAEE

SEQ ID NO: 68 - protein, 535 aa, Unknown
  Spicies not identified
MLAKDYTSDEKRIVKNVIDRYENSGVFLIEPGDPVLTEFYDIQLKLAGVTAAAAPQFSQLWQQTKRVKRVAGRMSEANTSGAQPVYSIVRLDSTDGKRYQTDAIGSLPVQATNVTQTLGLFDGGADNVGKVEYKSDYVYTADCTIGASGDYPQSQTSGSFPVTVIYTFAQTVGQQTVYGAEIVTTQSYPKEMINDSPRNLYNQRMIKICLTRDDGDCDYRTGYDQDGTVKVPIKGNITYFGNIDLSNGKPVNASNTIYLIRTRAGGDPITPYGGYNIFNSAATRISGNNITWDLDWLKFNRVDFESGEMVYYVFKITLDVEGRSIAAFITNAPKESDPDRRLLNTVQIKPMQIIYGCLAEDTLILMQDGTEKPINALTADEFVICGNNHPRRIENITTGQEQHYIDITARDQAAREYRIKASLGHPFVTANGIFLARELTSGMCLKTRHGECEITAISLQPGELTVYNLQLGADSPLQKNQCALSTFYANGVLVGDALVQHLYEDEYHQRPKNVLKTLPAEWHQDYHNMINAADE

SEQ ID NO: 69 - protein, 535 aa, Serratia marcescens
MLAKDYTSDEKRIVKNVIDRYENSGVFLIEPGDPVLTEFYDIQLKLAGVTAAAAPQFTQLWQQTKRVKRVAGRMSEANTSGAQPVYSIVRLDSTDGKRYQTDAIGSLPVQATNVTQTLGLFDGGADNVGKVEYKSDYVYTADCTIGASGDYPQSQTGGSFPVTVIYTFAQTVGQQTVYGAEIVTTQSYPKEMINDSPRNLYNQRMIKICLTRDDGDCDYRTGYDQDGTVKVPIKGNITYFGNIDLSNGKPVNASNTIYLIRTRAGGDPITPYGGYNIFNSAATRISGSNITWDLDWLKFNRVDFESGEMVYYVFKITLDVEGRSIAAFITNAPKESDPDRRLLNTVQIKPMQIIYGCLAEDTLILMQDGTEKPLNALTADEFVICGNNHPRRIENITTGQEQHYIDITARDQAAGEYRIKASLGHPFVTANGICLARELTSGMRLKTRHGECEITALSLQPGELTVYNLQLSADSPLQKTQCALSTFYANGVLVGDALVQHLYEDEYHQRPKNVLKMLPAEWRQDYHNMINAAEE

SEQ ID NO: 70 - protein, 535 aa, Serratia marcescens
MLAKDYTSDEKRIVKNVIDRYENSGVFLIEPGDPVLTEFYDIQLKLAGVTAAAAPQFTQLWQQTKRVKRVAGRMSEANTSGAQPVYSIVRLDSTDGKRYQTDAIGSLPVQATNVTQTLGLFDGGADNVGKVEYKSDYVYTADCTIGASGDYPQSQTGGSFPVTVIYTFAQTVGQQTVYGAEIVTTQSYPKEMINDSPRNLYNQRMIKICLTRDDGDCDYRTGYDQDGTVKVPIKGNITYFGNIDLSNGKPVNASNTIYLIRTRAGGDPITPYGGYNIFNSAATRISGNNITWDLDWLKFNRVDFESGEMVYYVFKITLDVEGRSIAAFITNAPKESDPDRRLLNTVQIKPMQIIYGCLAEDTLILMQDGTEKPINALTADEFVICGNNHPRRIENITTGQEQHYIDITARDQAAREYRIKASLGHPFVTANGICLARELTSGMRLKTRHGECEITALSLQSGELTVYNLQLSADSPLQKTQCALSTFYANGVLVGDALVQHLYEDEYHQRPKNVLKTLPAEWHQDYHNMINAAEE

SEQ ID NO: 71 - protein, 535 aa, Serratia marcescens
MLAKDYTSDEKRIVKNVIDRYENSGVFLIEPGDPVLTEFYDIQLKLAGVTAAAAPQFTQLWQQTKRVKRVAGRMSEANTSGAQPVYSIVRLDSTDGKRYQTDAIGSLPVQATNVTQTLGLFDGGADNVGKVEYKSDYVYTADCTIGASGDYPQSQTGGSFPVTVIYTFAQTVGQQTVYGAEIVTTQSYPKEMINDSPRNLYNQRMIKICLTRDDGDCDYRTGYDQDGTVKVPIKGNITYFGNIDLSNGKPVNASNTIYLIRTRAGGDPITPYGGYNIFNSAATRISGSSITWDLDWLKFNRVDFESGEMVYYVFKITLDVEGRSIAAFITNAPKESDPDRRLLNTVQIKPMQIIYGCLAEDTLILMQDGTEKPINALTADEFVICDNNHPRRIENITTGQEQHYIDITARDQAAGEYCIKASLGHPFVTANGICLARELTSGMRLKTRHGECEITALSLQSGELTVYNLQLSADSPLQKTQCALSTFYANGVLVGDALVQHLYEDEYHQRPKNVLKMLPAEWHQDYHNMINAAEE

SEQ ID NO: 72 - protein, 535 aa, Unknown
  Spicies not identified
MLAKDYTSDEKRIVKNVIDRYENSGVFLIEPDDPVLTEFYDIQLKLAGVTAAAAPQFSQLWQQTKRVKRVAGRMSEANTGGAQPVYSIVRLDSTDGKRYQTDAIGSLPVQATNVTQTLGLFDGGADNVGKVEYKSDYVYTADCTIGASGDYPQSQTGGSFPVTVIYTFAQTVGQQTVYGAEIVTTQSYPKEMINDSPRNLYNQRMIKICLTRDDGDCDYRTGYDQDGTVKVPIKGNITYFGNIDLSNGKPVNASNTIYLIRTRAGGDPITPYGGYNIFNSAATRISGNNITWDLDWLKFNRVDFESGEMVYYVFKITLDVEGRSIAAFITNAPKESDPDRRLLNTVQIKPMQIIYGCLAEDTLILMQDGTEKPINALTTDEFVICGNNQPKRIENITTGQEQHYIDITARDQAAREYRIKASLGHPFVTANGIFLARELTSGMCLKTRHGECEITAISLQPGELTVYNLQLGADSPLQKNQCAFSTFYANGVLVGDALVQHLYEDEYHQRPKNVLKTLPAEWHQDYHNMINAADE

SEQ ID NO: 73 - protein, 535 aa, Unknown
  Spicies not identified
MLAKDYTSDEKRIVKNVIDRYENSGVFLIEPGDPVLTEFYDIQLKLAGVTAAAAPQFTQLWQQTKRVKRVAGRMSEANTSGAQPVYSIVRLDSTDGKRYQTDAIGSLPVQATNVTQTLGLFDGGADNVGKVEYKSDYVYTADCTIGASGDYPQSQTGGSFPVTVIYTFAQTVGQQTVYGAEIVTTQSYPKEMINDSPRNLYNQRMIKICLTRDDGDCDYRTGYDQDGTVKVPIKGNITYFGNIDLSNGKPVNASNTIYLIRTRAGGDPITPYGGYNIFNSAATRISGSNITWDLDWLKFNRVDFESGEMVYYVFKITLDVEGRSIAAFITNAPKESDPDRRLLNTVQIKPMQIIYGCLAEDTLILMQDGTEKPINALTADEFVICGNNHPRRIENITTGQEQHCIDITARDQAAGEYRIKASLGHPFVTANGICLARELTSGMRLKTRHGECEITTLSLQPGELTVYNLQLSADSPLQKTQCALSTFYANGVLVGDALVQHLYEDEYHQRPKNVLKTLPAEWHQDYHNMINAAEE

SEQ ID NO: 74 - protein, 535 aa, Unknown
  Spicies not identified
MLAKDYTSDEKRIVKNVIDRYENSGVFLIEPDDPVLTEFYDIQLKLAGVTAAAAPQFSQLWQQTKRVKRVAGRMSEANTSGAQPVYSIVRLDSTDGKRYQTDAIGSLPVQATNVTQTLGLFDGGADNVGKVEYKSDYVYTADCTIGASGDYPQSQTGGSFPVTVIYTFAQTVGQQTVYGAEIVTTQSYPKEMINDSPRNLYNQRMIKICLTRDDGDCDYRTGYDQDGTVKVPIKGNITYFGNIDLSNGKPVNASNTIYLIRTRAGGDPITPYGGYNIFNSSATRISGNNITWDLDWLKFNRVDFESGEMVYYVFKITLDVEGRSIAAFITNAPKESDPDRRLLNTVQIKPMQIIYGCLAEGTLILMQDGTEKPINALTADEFVICGNNHPRRIENITTGQEQHYIDITARDLAAREYRIKASLGHPFVTANGIFLARELTSGMCLKTRHGECEITALSLQSGELTVYNLQLSADSPLQKNQCALSTFYANGVLVGDALVQHLYEDEYHQRPKNVLKTLPAEWHQDYHNMIKAADE

SEQ ID NO: 75 - protein, 535 aa, Unknown
  Spicies not identified
MLAKDYTSDEKRIVKNVIDRYENSGVFLIEPGDPVLTEFYDIQLKLAGVTAAAAPQFSQLWQQTKRVKRVAGRMSEANTSGAQPVYSIVRLDSTDGKRYQTDAIGSLPVQATNVTQTLGLFDGGADNVGKVEYKSDYVYTADCTIGASGDYPQSQTGGSFPVTVIYTFAQTVGQQTVYGAEIVTTQSYPKEMINDSPRNLYNQRMIKICLTRDDGDCDYRTGYDQDGTVKVPIKGNITYFGNIDLSNGKPVNASNTIYLIRTRAGGDPITPYGGYNIFNSAATRISGNNITWDLDWLKFNRVDFESGEMVYYVFKITLDVEGRSIAAFITNAPKESDPDRRLLNTVQIKPMQIIYGCLAEDTLILMQDGTEKPINALTADEFVICGNNHPRRIENITTGQEQHYIDITARDQAAREYRIKASLGHPFVTANGIFLARELTSGMCLKTRHGECEITAISLQPGELTVYNLQLGADSPLQKNQCALSTFYANGVLVGDALVQHLYEDEYHQRPKNVLKTLPAEWHQDYHNMINAADE

SEQ ID NO: 76 - protein, 535 aa, Unknown
  Spicies not identified
MLAKDYTSDEKRIVKNVIDRYENSGVFLIEPGDPILTEFYDIQLKLAGVTAAAAPQFTQLWQQTKRVKRVAGRMSEANTSGAQPVYSIVRLDSTDGKRYQTDAIGSLPVQATNVTQTLGLFDGGADNVGKVEYKSDYVYTADCTIGASGDYPQSQTGGSFPVTVIYTFAQTVGQQTVYGAEIVTTQSYPKEMINDSPRNLYNQRMIKICLTRDDGDCDYRTGYDQDGTVKVPIKGNITYFGNIDLSNGKPVNASNTIYLIRTRAGGDPITPYGGYNIFNSAATRISGNNITWDLDWLKFNRVDFESGEMVYYVFKITLDVEGRSIAAFITNAPKESDPDRRLLNTVQIKPMQIIYGCLAEDTLILMQDGTEKPINALTADEFVICCNNHPRRIENITTGQEQHYIDITARDQAAREYRIKASLGHPFVTANGICLARELTSGMRLKTRHGECEITALSLQSGELTVYNLQLSADSPLQKTQCALSTFYANGVLVGDALVQHLYEDEYHQRPKNVLKTLPAEWHQDYHNMINAAEE

SEQ ID NO: 77 - protein, 535 aa, Serratia marcescens
MLAKDYTSDEKRIVKNVIDRYENSGVFLIEPGDPVLTEFYDIQLKLAGVTAAAAPQFTQLWQQTKRVKRVAGRMSEANTSGAQPVYSIVRLDSTDGKRYQTDAIGSLPVQATNVTQTLGLFDGGADNVGKVEYKSDYVYTADCTIGASGDYPQSQTGGSFPVTVIYTFAQTVGQQTVYGAEIVTTQSYPKEMINDSPRNLYNQRMIKICLTRDDGDCDYRTGYDQDGTVKVPIKGNITYFGNIDLSNGKPVNASNTIYLIRTRAGGDPITPYGGYNIFNSAATRISGNNITWDLDWLKFNRVDFESGEMVYYVFKITLDVEGRSIAAFITNAPKESDPDRRLLNTVQIKPMQIIYGCLAEDTLILMQDGTEKPINALTADEFVICGNNHPRRIENITTGQEQHYIDITTRDQAAREYRIKASLGHPFVTANGICLARELTSGMRLKTRHGECEITALSLQSGELTVCNLQLSADSPLQKTQCALSTFYANGVLVGDALVQHLYEDEYHQRPKNVLKTLPAEWHQDYHNMINAAEE

SEQ ID NO: 78 - protein, 535 aa, Serratia ureilytica
MLAKDYTSDEKRIVKNVIDRYENSGVFLIEPGDSVLTEFYDIQLKLAGVTAAAAPQFSQLWQQTKRVKRVAGRMSEANTGGAQPVYSIVRLDSTDGKRYQTDAIGSLPVQATNVTQTLGLFDGGADNVGKVEYKSDYVYTADCTIGASGDYPQSQTGGSFPVTVIYTFAQTVGQQTVYGAEIVTTQSYPKEMINDSPRNLYNQRMIKICLTRDDGDCDYRTGYDQDGTVKVPIKGNITYFGNIDLSNGKPVNASNTIYLIRTRAGGDPITPYGGYNIFNSAATRISGNNITWDLDWLKFNRVDFESGEMVYYVFKITLDVEGRSIAAFITNAPKESDPDRRLLNTVQIKPMQIIYGCLAEDTLILMQDGTEKPINALTTDEFVICGNNQPKRIENITTGQEQHYIDITARDQAAREYRIKASLGHPFVTANGIFLARELTSGMCLKTRHGECEITAISLQPGELTVYNLQLGADSPLQKNQCALSTFYANGVLVGDALVQHLYEDEYHQRPKNVLKTLPAEWHQDYHNMINAADE

SEQ ID NO: 79 - protein, 462 aa, Serratia marcescens
MSEANTSGAQPVYSIVRLDSTDGKRYQTDAIGSLPVQATNVTQTLGLFDGGADNVGKVEYKSDYVYTADCTIGASGDYPQSQTGGSFPVTVIYTFAQTVGQQTVYGAEIVTTQSYPKEMINDSPRNLYNQRMIKICLTRDDGDCDYRTGYDQDGTVKVPIKGNITYFGNIDLSNGKPVNASNTIYLIRTRAGGDPITPYGGYNIFNSTATRISGSNITWDLDWLKFNRVDFESGEMVYYVFKITLDVEGRSIAAFITNAPKESDPDRRLLNTVQIKPMQIIYGCLAEDTLILMQDGTEKPINALTADEFVICGNNHPRRIENITTGREQHYIDITARDQAAREYRIKASLGHPFVTANGICLARELTSGMRLKTRHGECEITALSLQPGELTVYNLQLSADSPLQKTQCALSTFYANGVLVGDALVQHLYEDEYHQRPKNVLKTLPAEWHQDYHNMINAAEE

SEQ ID NO: 80 - protein, 535 aa, Serratia marcescens
MLTKDYTSDEKRIVKNVIDRYENSGVFLIEPGDPTLVQFYDIQLKLAGVTPAAAPQFTRLWQQTKSARQVSGWLGEADSNGVQPVYSIVRLDSTDGRHYQTDAIGSLPVKATNVTQTLGLFNGSADNVGNVSYKSDYVYTSDCTIGASGDYPQSQTSGDFPVTVIYTFAQTVGQQTVYGAEIVTTQSYPKEIRNDSPRNLYNQQMIKICLTRDDGDCDYRTSYDQDGTVKVPIKGNITYFGKIDLNNGQAVNATNTIYLIRTRAGGDPITPLGGYNIFNSPATRINGDNISWDLNWLKFNRVDFESGEQVYYVFKITLNVEGRSIAAFITNAPKDIDPDRRMLNTVQIKPMQIIYGCLAADTLITLQDGTEKTIDTIEPNDFVLCGNHQPRRVENITTGQEQNYIEITAQGGNGQLFSITASMGHPFVTASGILTARELTVGMRLKTLHGECEVTAVLNKSGELQVYNLQLSADLPLQKTQCGVNTFYANGVLVGDALVQHLYEDEYHQRPQNILQALPAEWHTDFHNMNSRTGK

SEQ ID NO: 81 - protein, 535 aa, Serratia species
MLTKDYTSDEKRIVKNVIDRYENSGVFLIEPGDPTLVQFYDIQLKLAGVTPAAAPQFTRLWQQTKSARQVSGRLGEADSNGVQPVYSIVRLDSTDGRHYQTDAIGSLPVKATNVTQTLGLFNGSADNVGNVSYKSDYVYTSDCTIGASGDYPQSQTSGDFPVTVIYTFAQTVGQQTVYGAEIVTTQSYPKEIRNDSPRNLYNQQMIKICLTRDDGDCDYRTSYDQDGTVKVPIKGNITYFGKIDLNNGQAVNATNTIYLIRTRAGGDPITPLGGYNIFNSPATRINGDNISWDLNWLKFNRVDFESGEQVYYVFKITLNVEGRSIAAFITNAPKDIDPDRRMLNTVQIKPMQIIYGCLAADTLITLQDGTEKTIDAIEPNDFVLCGNHHPRRVENITTGQEQNYIEITAQGDDGQLFGITASMGHPFVTANGILTARELTTGMRLKTLHGECEITAVLNKSGELQVYNLQLSADLPLQKIQCSVNTFYANGVLVGDALVQHLYEDEYHQRPQNILQALPAEWHTDFHNMNSRTGK

SEQ ID NO: 82 - protein, 529 aa, Serratia proteamaculans
MITQGYTSDEQSVVKNVIGKYSNTGLFIIDPADPLLVRFYDIQLKLAGLTSGYSPQFTQCWQETKRLKRSGGRLSEASNGSSKPVYSIVRLDSTDGSNYRADAIGSLPVSAANVTQTLGLFDGEAVNVGAVNHNQAYVYAADCTLSANGVYPASQIATDYPVTVIYTFAQTIDRDTIYGAEIITTQSYPKDIYNESPRSIINPNEIKICLTRDEPDCDYRNTYDGSVRVPIKGNITYLGQIELSGGQPVKASNTIYLIRTRAGGDPVTPLGNYNIFNSPNTRINGNNISWDLDWLRFNQVNFDSGEWIYYVFKVILNVEGKSIVAFITNAPKEIEPDQRFLNTVQLKPMRIVYGCLAGDSKILMQDGSEKLISAIDIGETVLSKNNNPLRVEAVTRGQEHHYLEISVRNSAGNIRKITASLGHPFITPSGVVIARELTSSSKLITLDGESEIVSIVQQQGDLKVYNLQLSSDDEHYTDNCLYANGILVGDIQMQRVYEDEYHQRPANVLSKLPKEWHQDYQNHLDKAGK

SEQ ID NO: 83 - protein, 529 aa, Serratia liquefaciens
MITQGYTSDEQSVVKNVIGKYSNTGLFIIDPADPLLVRFYDIQLKLAGLTSGYSPQFTQCWQETKRLKRSGGRLSEASNGSSQPVYSIVRLDSTDGSNYRADAIGSLPVSAANVTQTLGLFDGEAVNVGAVNHNQAYVYAADCTLSANGVYPASQIATDYPVTVIYTFAQTIDRDTIYGAEIITTQSYPKDIYNESPRSIINPNEIKICLTRDEPDCDYRNTYDGSVRVPIKGNITYLGQIELSGGQPVKASNTIYLIRTRAGGDPVTPLGNYNIFNSPNTRINGNNISWDLDWLRFNQVNFDSGEWIYYVFKVILNVEGKSIVAFITNAPKEIEPDQRFLNTVQLKPMRIVYGCLAGDSKILMQDGSEKLISAIDIGETVLSKNNNPLRVEAVTRGQEHHYLEISVRNSAGNIRKITASLGHPFITPSGVVIARELTSSSKLITLDGESEIVSIVQQQGDLKVYNLQLSSDDEHYTDNCLYANGILVGDIQMQRVYEDEYHQRPANVLSKLPKEWHQDYQNHLDKAGK

SEQ ID NO: 84 - protein, 535 aa, Serratia plymuthica
MITQNYTSDEKSIVQAVINQYSNTGIFIIEPGNPLLVDFYDIQLRLAGVTPGASPQFSQVWQQSKQSKRTAGRLSEAGNGYAQPVYSIVRLDSIDGRSYRADAIGSLPVSASNVTQTLGLFDAEATNVGQVTSNKAYVYTADCAITANGDYPQSQLTGDFPVTVIYTFAQTIDQNTFYGAEIITTQSYPKSIYNDSPRSLYNQDAIKICLTRDAPDCDYRYSYDGDGTVRVPIKGTITYNGKIDLNAGQPVNAKNVIYLIRTRAGGDPVTPYGDLNIFNSPNTQINGDTLSWDLNWLKFNQVDFESGEWVYYVFRVNLNVEGRDIVAFITNAPKNLEPDQRFLNTAPLKPMCIVYGCLGENTKILMQDGNEKIITDISAGEYIRTRNGHALRIDAITTGHERHYVEITLRDNSNKIKNITASLGHPFITSAGIVMARELNHDSRVITLDGEADIVSLVQKEGDIKIYNLQLPIDTPVDRLPYDNNTFYANGILVGDNLMQRVCEDEYHRRPVNILSKLPQEWHQDYQNHLNLAGK

SEQ ID NO: 85 - protein, 535 aa, Serratia plymuthica
MITQNYTSDEKSIVQAVINQYSNTGIFIIEPGNPLLVDFYDIQLRLAGVTPGASPQFSQVWQQSKQSKRTAGRLSEAGNGYAQPVYSIVRLDSIDGRSYRADAIGSLPVSASNVTQTLGLFDAGATNVGQVTSNKAYVYTADCAITANGDYPQSQLTGDFPVTVIYTFAQTIDQNTFYGAEIITTQSYPKSIYNDSPRSLYNQDAIKICLTRDAPDCDYRYSYDGDGTVRVPIKGTITYNGKIDLNAGQPVNAKNVIYLIRTRAGGDPVTPYGDLNIFNSPNTQINGDTLSWDLNWLKFKQVDFESGEWVYYVFRVNLNVEGRNIVAFITNAPKNLEPDQRFLNTAPLKPMCIVYGCLGENTKILMQDGNEKIITDISAGEYIQTRNGHALRIDAITTGHERHYVEITLRDNSNKIKNITASLGHPFITSAGIVMARELNHDSRVITLDGEAEIVSLVQKEGDIKVYNLQLPIDTPVDRLPYDNNTFYANGIVVGDNLMQRVCEDEYHRRPVNILSKLPQEWHQDYQNHLNLAGK

SEQ ID NO: 86 - protein, 535 aa, Serratia plymuthica
MITQNYTSDEKNIVKAVINRYSNTGIFIIEPGNPLLVDFYDIQLRLAGVTPGASPQFSQVWQQSKQSKRTAGRLSEAGNGYAQPVYSIVRLDSIDGRSYRADAIGSLPVSASNVTQTLGLFDAEATNVGQVTSNKAYVYTADCAITANGDYPQSQLTGDFPVTVIYTFAQTIDQNTFYGAEIITTQSYPKSIYNDSPRSLYNQDAIKICLTRDAPDCDYRYSYDGDGTVRVPIKGTITYNGKIDLNAGQPVNAKNVIYLIRTRAGGDPVTPYGDLNIFNSPNTQINGDTLSWDLNWLKFKQVDFESGEWVYYVFRVNLNVEGRNIVAFITNAPKNLEPDQRFLNTAPLKPMCIVYGCLGENTKILMQDGNEKIITDISAGEYIQTRNGHVLRIDAITTGHERHYVEITLRDNSNKIKNITASLGHPFITSAGIVMARELNHASRVITLDGEAEIVSLVQKEGDIKVYNLQLPIDTPVDRLPYDNNTFYANGILVGDNLMQRICEDEYHRRPVNILSKLPQEWHQDYQNHLNLAGK

SEQ ID NO: 87 - protein, 538 aa, Unknown
  Spicies not identified
MGTDIMITQGYTSDEKTIVKNVISKYSNAGLFIIEPGDPLLVSFYDIQLKLAGLTPGNTPQFTQCWQQAKRLKLSAGRLSDAGNGSAQPVYSIVRLDSTDGRNYRANAIGSLPVSATNVTQTLGLFDGEAGNVGPVNYNQAYVYAADCALSADGVYPGSQIAADYPVTVIYTFAQTIGNQTVYGAEIITSQSYPKNIYNESPRSLINPNEIKICLTRDEADCDYRNNYDGSVRVPIKGNITYLGQIELNGGQPVKASNTIYLIRTRAGGDPVTPFGNYNIFNSANTRIIGDNISWDLDWLRFNQVDFDSGEWIYYVFKVILNVDGKSIATFITNAPKSLEPDQRFLNTELLKPMRIVYGCLAENTKILMPDGGEKSISDLAIGEYVLSRNNTPLKIEAITNGQERNSIEITTNNSKGKIRTITSSLGHPFITSAGVVIARELNHSSKLITLEGECEIISIVQQQGELKVYNLQLTAEAPVDKTLYDDNTLYANGILVGDIQMQRIYEDEYYQRPANILSKLPKEWHQDYQNHLNAAGK

SEQ ID NO: 88 - protein, 535 aa, Serratia plymuthica
MITQDYTSDEKTIVKAVINRYSNTGIFIIEPGNPLLVYFYDIQLRLAGITPGVSPQFTQRWQQSKQSKGTAGRLSEAGNGDAQPVYSIVRLDSLDGRSYRADAIGSLPVSATNVTQTLGLFDTEATNVGQVTSNKAYIYTADCAITANGDYPQSQLTDDFPVTVIYTFAQTIDQSTFYGAEIITTQSYPKSIYNDSPRSLYNQDAIKICLTRDAADCDYRYTYDGDGTVRVPIKGNITYYGKIDIVDGRPVNAKNIIYLIRTRAGGDPVTPYDDLNIFNSPNTKINDDTLSWDLNWLKFKQVDFESGEWVYYVFRVNLNVEGRNIVAFITNAPKNIEPDQRFLNTAPLKPMCIVYGCLGENTKILMQDGNEKTIANISTGEYIRTRNGRTLRVDAITTGYECHYVEITVQDTNNKTRTIIASLGHPFITSSGVVLTRELCQTSKLLTLDGEAEIISMVQKDGNIKVYNLQLPIDTPANTAPYDNNTFYANGILVGDNLMQRVYEDEYHQRPVNILSKLPQEWHQDYHNHLNLAGK

SEQ ID NO: 89 - protein, 533 aa, Serratia proteamaculans
MITQGYTSDEKTIVKNVISKYSNAGLFIIEPGDPLLVSFYDIQLKLAGLTPGNTPQFTQCWQQAKRLKLSAGRLSDAGNGSAQPVYSIVRLDSTDGRNYRANAIGSLPVSATNVTQTLGLFDGEAANVGPVNYNQAYVYAADCALSADGVYPGSQIAADYPVTVIYTFAQTIGNQTVYGAEIITSQSYPKNIYNESPRSLINPNEIKICLTRDEADCDYRNNYDGSVRVPIKGNITYLGQIELNGGQPVKASNTIYLIRTRAGGDPVTPFGNYNIFNSANTRIIGDNISWDLDWLRFNQVDFDSGEWIYYVFKVILNVDGKSIATFITNAPKSLEPDQRFLNTELLKPMRIVYGCLAENTRILMQDGGEKLISDLTIGEYVLSRNNIPLRIEAITNGQERNFIEITTQNSKGKIRTITSSLGHPFITSTGVVIARELNHTSKLITLEGECEIISIEQQQGELKVYNLQLTAEAPVDKGLYDDNTLYANGILVGDLQMQRIYEDEYYQRPVNILSKLPKEWHQDYQNHLNAAGK

SEQ ID NO: 90 - protein, 535 aa, Serratia plymuthica
MITQNYTPYEKSIVQAVINQYSNTGIFIIEPGNPLLVDFYDIQLRLAGVTPGASPQFSQVWQQSKQSKRTAGRLSEAGNGYAQPVYSIVRLDSIDGRSYRADAIGSLPVSASNVTQTLGLFDAEATNVGQVTSNKAYVYTADCAITANGDYPQSQLTGDFPVTVIYTFAQTIDQNTFYGAEIITTQSYPKSIYNDSPRSLYNQDAIKICLTRDAPDCDYRYSYDGDGTVRVPIKGAITYNGKIDLNAGQPVNAKNVIYLIRTRAGGDPVTPYDDLNIFNSPNTQINGDTLSWDLNWLKFKQVDFESGEWVYYVFRVNLNVEGRNIVAFITNAPKNLEPDQRFLNTAPLKPMCIVYGCLGENTKILMQDGNEKIIADISAGEYIRTRNGHALRIDAITTGHERHYVEITLRDNGNKIKNITASLGHPFITSAGIVMARELNHASRVITLDGEAEIVSLVQKEGDIKVYNLQLPIDTPVDRVPYDNNTFYANGILVGDNLMQRICEDEYHRRPVNILSKLPQEWHQDYQNHLNLAGK

SEQ ID NO: 91 - protein, 535 aa, Serratia plymuthica
MITQNYTPYEKSIVQAVINQYSNTGIFIIEPGNPLLVDFYDIQLRLAGVTPGASPQFSQVWQQSKQSKRTAGQLSKAGNGYAQPVYSIVRLDSIDGRSYRADAIGSLPVSASNVTQTLGLFDAEATNVGQVTSNKAYVYTADCAITANGDYPQSQLTGDFPVTVIYTFAQTIDQNTFYGAEIITTQSYPKSIYNDSPRSLYNQDAIKICLTRDAPDCDYRYSYDGDGTVRVPIKGAITYNGKIDLNAGQPVNAKNVIYLIRTRAGGDPVTPYDDLNIFNSPNTQINGDTLSWDLNWLKFKQVDFESGEWVYYVFRVNLNVEGRNIVAFITNAPKNLEPDQRFLNTAPLKPMCIVYGCLGENTKILMQDGNEKIIADISAGEYIRTRNGHALRIDAITTGHERHYVEITLRDNGNKIKNITASLGHPFITSAGIVMARELNHASRVITLDGEAEIVSLVQKEGDIKVYNLQLPIDTPVDRVPYDNNTFYANGILVGDNLMQRICEDEYHRRPVNILSKLPQEWHQDYQNHLNLAGK

SEQ ID NO: 92 - protein, 535 aa, Serratia plymuthica
MITQNYTPYEKSIVQAVINQYSNTGIFIIEPGNPLLVDFYDIQLRLAGVTPGASPQFSQVWQQSKQSKRTAGRLSEAGNGYAQPVYSIVRLDSIDGRSYRADAIGSLPVSASNVTQTLGLFDAEATNVGQVTSNKAYVYTADCAITANGDYPQSQLTGDFPVTVIYTFAQTIDQNTFYGAEIITTQSYPKSIYNDSPRSLYNQDAIKICLTRDAPDCDYRYSYDGDGTVRVPIKGAITYNGKIDLNAGQPVNAKNVIYLIRTRAGGDPVTPYGDLNIFNSPNTQINGDTLSWDLNWLKFKQVDFESGEWVYYVFRVNLNVEGRNIVAFITNAPKNLEPDQRFLNTAPLKPMCIVYGCLGENTKILMQDGNEKIIADISAGEYIRTRNGHALRIDAITTGHERHYVEITLRDNGNKIKSITASLGHPFITSAGIVMARELNHASRVITLDGEAEIVSLVQKEGDIKVYNLQLPIDTPGYSVPYDNNTFYANGILVGDNLMQRVCEDEYHRRPVNILSKLPQEWHQDYQNHLNLAGK

SEQ ID NO: 93 - protein, 529 aa, Serratia liquefaciens
MITQGYTSDEKSIVKNVIGKYSNTGLFIIEPDDPLLVSFYDIQLKLAGLTSGYSPQFTQCWQETKRLKCSGGRLSEASNGSAQPVYSIVRLDSTDGSNYRADAIGSLPVSAANVTQTLGLFDGEAVNVGTVNYNQAYVYAADCTLSANGVYPGSQIATDYPVTVIYTFAQTIDRETIYGGEIITTQSYPKDIYNESPRSIINPNEIKICLTRDEPDCDYRNTYDGSVRVPIKGNITYLGQIELSGGQPVKASNTIYLIRTRAGGDPVTPFGNYNIFNSPNTRINGNNISWDLDWLRFNQVNFDSGEWIYYVFKVILNVEGKSIVAFITNAPKEIEPDQRFLNTVQLKPMRIVYGCLAGDSKILMQDGSEKPISAIDIGETVLSKNNKPLRVEAVTSGQEHHYLKISVRNSTGKTSNITTSLGHPFITPSGVVIARELTSSSKLITLDGESEIISIVQQHGDLKVYNLQLSSHDEHYTDNCLYANSILVGDIQMQRIYEDEYHQRPANVLSKLPKEWHQDYQNHLDKVGK

SEQ ID NO: 94 - protein, 529 aa, Unknown
  Spicies not identified
MITQGYTSDEQSVVKNVIGKYSNTGLFIIDPADPLLVRFYDIQLKLAGLTSGYSPQFTQCWQETKRLKRSGGRLSEASNGSSQPVYSIVRLDSTDGSNYRADAIGSLPVSAANVTQTLGLFDGEAVNVGAVNHNQSYVYAADCTLSANGVYPASQIATDYPVTVIYTFAQTIDRDTIYGAEIITTQSYPKDIYNESPRSIINPNEIKICLTRDEPDCDYRNTYDGSVRVPIKGNITYLGQIELSGGQPVKASNTIYLIRTRAGGDPVTPLGNYNIFNSPNTRINGNNISWDLDWLRFNQVNFDSGEWIYYVFKVILNVEGKSIVAFITNAPKEIEPDQRFLNTVQLKPMRIVYGCLAGDSKILMQDGSEKLISAIDIGETVLSKNNNSLRVEAVTRGQEHHYLEINVRNSAGNIRKITASLGHPFITPSGVVIARELTSSSKLITLDGESEIVSIVQQQGDLKVYNLQLSSDDEHYTDNCLYANGILVGDIQMQRVYEDEYHQRPANVLSKLPKEWHQDYQNHLDKAGK

SEQ ID NO: 95 - protein, 535 aa, Unknown
  Spicies not identified
MITKNYTSDEKSIVQAVINQYSNTGIFIIEPGNPLLVDFYDIQLRLAGVTPGASPQFSQVWQQSKQSKRTAGRLSEAGNGYAQPVYSIVRLDSIDGRSYRADAIGSLPVSASNVTQTLGLFDAEATNVGQVTSNKAYVYTADCAITANGDYPQSQLTGDFPVTVIYTFAQTIDQNTFYGAEIITTQSYPKSIYNDSPRSLYNQDAIKICLTRDAPDCDYRYSYDGDGTVRVPIKGTITYNGKIDLNAGQPVNAKNVIYLIRTRAGGDPVTPYGDLNIFNSPNTQINGDTLSWDLNWLKFNQVDFESGEWVYYVFRVNLNVEGRNIVAFITNAPKNLEPDQRFLNTAPLKPMCIVYGCLGENTKILMQDGNEKIITDISAGEYIRTRNGHALRIDAITTGHERHYVEITLRDNSNKIKNITASLGHPFITSAGIVMARELNHDSRVITLDGEAEIVSLVQKEGDIKVYNLQLPIDTPVDRLPYDNNTFYANGILVGDNLMQRVCEDEYHRRPVNILSKLPQEWHQDYQNHLNLAGK

SEQ ID NO: 96 - protein, 533 aa, Unknown
  Spicies not identified
MITQGYTSDEKTIVKNVISKYSNAGLFIIEPGDPLLVSFYDIQLKLAGLTPGNTPQFTQCWQQAKRLKLSAGRLSDAGNGSAQPVYSIVRLDSTDGRNYRANAIGSLPVSATNVTQTLGLFDGEAANVGPVNYNQAYVYAADCALSADGVYPGSQIAADYPVTVIYTFAQTIGNQTVYGAEIITSQSYPKNIYNESPRSLINPNEIKICLTRDEADCDYRNNYDGSVRVPIKGNITYLGQIELNGGQPVKASNTIYLIRTRAGGDPVTPFGNYNIFNSANTRIIGDNISWDLDWLRFNQVDFDSGEWIYYVFKVILNVDGKSIATFITNAPKSLEPDQRFLNTELLKPMRIVYGCLAENTKILMQDGDEKLISDLAIGECVLSRNNIPLRIEAITNGQERNFIEITTQNSKGKIRTITTSLGHPFITSAGVVIARELNHTSKLITLEGECEIISIEQQQGELKVYNLQLTAEAPVDKGLYDDNTLYANGILVGDLQMQRIYEDEYYQRPVNILSKLPKEWHQDYQNHLNAAGK

SEQ ID NO: 97 - protein, 533 aa, Unknown
  Spicies not identified
MITQGYTSDEKTIVKSVISKYSNAGLFIIQPGDPLLVSFYDIQLKLAGLASGNTPQFTQCWQQAKLLKRSAGRLSEASDGSAQPVYSIVRLDSIDGRNYRADAIGSLPVSAANVTQTLGLFDAEATNVGAVNYNQAYVYAADCTLSANGVYPGSQIAADYPVTVIYTFAQTINNNTVYGAEIITSQSYPKDIYNESPRSINNPNEIKICLTRDEGDCDYRNTYDGSVRVPIKGNITYLGQIDLSGGRPVNASNSIYLIRTRAGGDPVTPFGDYNIFNSPNTRINSNNIAWDLDWLRFNQVDFESGEWVYYVFKVILNVDGKSIVSFITNAPKNLEPDQRFLNTVQLKPMRIVYGCLAEDTKILMQDGSEKPISAISIGETLLSRNNQPLRVEAVTSGQERHYIELTLRNDKGKITNITTSRGHPFITSSGVVIARELNHSTKLITLDGESEIISMVQQQGDLKVYNLQLSAEPSAENGLYDDNTLYANGILVGDIQMQRIYEDEYYQRPANILNKLPKEWHQDYQNHLNSAGK

SEQ ID NO: 98 - protein, 535 aa, Serratia species
MITQNYTPYEKSIVQAVINQYSNTGIFIIEPGNPLLVDFYDIQLRLAGVTPGASPQFSQVWQQSKQSKRTAGQLSKAGNGYAQPVYSIVRLDSIDGRSYRADAIGSLPVSASNVTQTLGLFDAEATNVGQVTSNKAYVYTADCAITANGDYPQSQLTGDFPVTVIYTFAQTIDQNTFYGAEIITTQSYPKSIYNDSPRSLYNQDAIKICLTRDAPDCDYRYSYDGDGTVRVPIKGAITYNGKIDLNAGQPVNAKNVIYLIRTRAGGDPVTPYDDLNIFNSPNTQINGDTLSWDLNWLKFKQVDFESGEWVYYVFRVNLNVEGRNIVAFITNAPKNLEPDQRFLNTAPLKPMCIVYGCLGEHTKILMQDGNEKIITDISAGEYIRTRNGHALRIDAITTGHERHYVEITLRDNGNKIKNITASLGHPFITSAGIVMARELNHASQVITLDGEAEIVSLVQKEGDIKVYNLQLPIDTPVDRVPYDNNTFYANGILVGDNLMQRICEDEYHRRPVNILSKLPQEWHQDYQNHLNLAGK

SEQ ID NO: 99 - protein, 529 aa, Unknown
  Spicies not identified
MITQGYTSDEQSVVKNVIGKYSNTGLFIIDPADPLLVRFYDIQLKLAGLTLGYSPQFTQCWQETKRLKRSGGRLSEASNGSSQPVYSIVRLDSTDGSNYRADAIGSLPVSAANVTQTLGLFDGEAVNVGAVNHNQAYVYAADCTLSANGVYPASQIATDYPVTVIYTFAQTIDRDTIYGAEIITTQSYPKDIYNESPRSIINPNEIKICLTRDEPDCDYRNTYDGSVRVPIKGNITYLGQIELSGGQPVKASNTIYLIRTRAGGDPVTPLGNYNIFNSPNTRINGSNISWDLDWLRFNQVNFDSGEWIYYVFKVILNVEGKSIVAFITNAPKEIEPDQRFLNTVQLKPMRIVYGCLAGDSKILMQDGSEKLISAIDTGETVLSKNNNPLRVEAVTRGQEHHYLEISVRNSAGNIRKITASLGHPFITPSGVVIARELTSSSKLITLDGESEIVSIVQQQGDLKVYNLQLSSDDEHYTDNCLYANGILVGDIQMQRVYEDEYHQRPANVLSKLPKEWHQDYQNHLDKAGK

SEQ ID NO: 100 - protein, 535 aa, Unknown
  Spicies not identified
MITQNYTSDEKSIVQAVINQYSNTGIFIIEPGNPLLVDFYDIQLRLAGVTPGASPQFSQVWQQSKQSKRTAGRLSEAGNGYAQPVYSIVRLDSIDGRSYRADAIGSLPVSASNVTQTLGLFDAGATNVGQVTSNKAYVYTADCAITANGDYPQSQLTGDFPVTVIYTFAQTIDQNTFYGAEIITTQSYPKSIYNDSPRSLYNQDAIKICLTRDAPDCDYRYSYDGDGTVRVPIKGTITYNGKIDLNAGQPVNAKNVIYLIRTRAGGDPVTPYGDLNIFNSPNTQINGDTLSWDLNWLKFNQVDFESGEWVYYVFRVNLNVEGRNIVAFITNAPKNLEPDQRFLNTAPLKPMCIVYGCLGENTKILMQDGNEKIITDISAGEYIQTRNGHALRIDAVTTGHERHYVEITLRDNSNKIKNITASLGHPFITSAGIVMAQELNHDSRVITLDGEAEIVSLVQKEGDIKVYNLQLPIDTPVDRLPYDNNTFYANGILVGDNLMQRVCEDEYHRRPVNILSKLPQEWHQDYQNHLNLAGK

SEQ ID NO: 101 - protein, 535 aa, Unknown
  Spicies not identified
MITKNYTSDEKSIVQAVINQYSNTGIFIIEPGNPLLVDFYDIQLRLAGVTPGASPQFSQVWQQSKQSKRTAGRLSEAGNGYAQPVYSIVRLDSIDGRSYRADAIGSLPVSASNVTQTLGLFDAEATNVGQVTSNKAYVYTADCAITANGDYPQSQLTGDFPVTVIYTFAQTIDQNTFYGAEIITTQSYPKSIYNDSPRSLYNQDAIKICLTRDAPDCDYRYSYDGDGTVRVPIKGTITYNGKIDLNAGQPVNAKNVIYLIRTRAGGDPVTPYGDLNIFNSPNTQINGDTLSWDLNWLKFKQVDFESGEWVYYVFRVNLNVEGRNIVAFITNAPKNLEPDQRFLNTAPLKPMCIVYGCLGENTKILMQDGNEKIITDISAGEYIQTRNGHALRIDAITTGHERHYVEITLRDNSNKIKNITASLGHPFITSAGIVMARELNHDSRVITLDGEAEIVSLVQKEGDIKVYNLQLPIDTPVDRLPYDNNTFYANGILVGDNLMQRVCEDEYHRRPVNILSKLPQEWHQDYQNHLNLAGK

SEQ ID NO: 102 - protein, 535 aa, Serratia plymuthica
MITKNYTSDEKSIVQAVINQYSNTGIFIIEPGNPLLVDFYDIQLRLAGVTPGASPQFSQVWQQSKQSKRTAGRLSEAGNGYAQPVYSIVRLDSIDGRSYRADAIGSLPVSASNVTQTLGLFDAEATNVGQVTSNKAYVYTADCAITANGDYPQSQLTGDFPVTVIYTFAQTIDQNTFYGAEIITTQSYPKSIYNDSPRSLYNQDAIKICLTRDAPDCDYRYSYDGDGTVRVPIKGTITYNGKIDLNAGQPVNAKNVIYLIRTRAGGDPVTPYGDLNIFNSPNTQINGDTLSWDLNWLKFKQVDFESGEWVYYVFRVNLNVEGRNIVAFITNAPKNLEPDQRFLNTAPLKPMCIVYGCLGENTKILMQDGNEKIITDISAGEYIRTRNDHALRIDAITTGHERHYVEITLRDNSNKIKNITASLGHPFITSAGIVMARELNHASRVITLDGEAEIVSLVQKEGDIKVYNLQLPIDTPVDRLPYDNNTFYANGILVGDNLMQRVCEDEYHRRPVNILSKLPQEWHQDYQNHLNLAGK

SEQ ID NO: 103 - protein, 535 aa, Serratia plymuthica
MITQNYTPYEKSIVQAVINQYSNTGIFIIEPGNPLLVDFYDIQLRLAGVTPGASPQFSQVWQQSKQSKRTAGRLSEAGNGYAQPVYSIVRLDSIDGRSYRAYAIGSLPVSASNVTQTLGLFDAEATNVGQVTSNKAYVYTADCAITANGDYPQSQLTGDFPVTVIYTFAQTIDQNTFYGAEIITTQSYPKSIYNDSPRSLYNQDAIKICLTRDAPDCDYRYSYDGDGTVRVPIKGAITYNGKIDLNAGQPVNAKNVIYLIRTRAGGDPVTPYDDLNIFNSPNTQINGDTLSWDLNWLKFKQVDFESGEWVYYVFRVNLNVEGRNIVAFITNAPKNLEPDQRFLNTAPLKPMCIVYGCLGENTKILMQDGNEKIIADISAGEYIRTRNGHALRIDAITTGHERHYVEITLRDNGNKIKNITASLGHPFITSAGIVMARELNHASRVITLDGEAEIVSLVQKEGDIKVYNLQLPIDTPVDRVPYDNNTFYANGILVGDNLMQRICEDEYHRRPVNILSKLPQEWHQDYQNHLNLAGK

SEQ ID NO: 104 - protein, 535 aa, Serratia plymuthica
MITQNYTQYEKSIVQAVINQYSNTGIFIIEPGNPLLVDFYDIQLRLAGVTPGASPQFSQAWQQSKQSKRTAGRLSEAGNGYAQPVYSIVRLDSIDGRSYRADAIGSLPVSASNVTQTLGLFDAEATNVGQVTSNKAYVYTADCAITANGDYPQSQLTGDFPVTVIYTFAQTIDQNTFYGAEIITTQSYPKSIYNDSPRSLYNQDAIKICLTRDAPDCDYRYSYDGDGTVRVPIKGAITYNGKIDLNAGQPVNAKNVIYLIRTRAGGDPVTPYGDLNIFNSPNTQINGDTLSWDLNWLKFKQVDFESGEWVYYVFRVNLNVEGRNIVAFITNAPKNLEPDQRFLNTAPLKPMCIVYGCLGENTKILMQDGNEKIITDISAGEYIRTRNGHALRIDAITTGHERHYVEITLRDNGNKIKSITASLGHPFITSAGIVMARELNHASRVITLDGEAEIVSLVQKEGDIKVYNLQLPIDTPVDRVPYDNNTFYANGILVGDNLMQRICEDEYHRRPVNILSKLPQEWHQDYQNHLNLAGK

SEQ ID NO: 105 - protein, 537 aa, Unknown
  Spicies not identified
MQPATQPSGKNSFSENNIISSVINKYANTGVFIINTNDPLLVKFYDIQLALAGVSLVRYPNFSQLWVNNKLARHAVSSLAMGDSDSAQQVHSIVSLDSTDGQTFSANAIGSLPVSAVNITQTLGIFDESGSPTGTVQCKKNYIYTANCPIQADGTFPASLKQTRYPVNIIYTFSQTVNNQTVYGAEIVTTQSYPKLIQNDSPADLNKNNLIKICLARKENDCDYFNSFDGNVTVPIKGSVTYFGNIDLNNGKPINAYNSIYLVRERQGGDPITPASNFNFFDDAKTRINGNVLSWDLDWLKFKRPDFESGERVYYIFKVTLQIEGASVASFITNAPGQFDPEQRFLNTNTLKPMQITYGCLGKGTPILMQDGKEKAIDDILIGEWVQSQDGRALRVEDVITGAEQNYLEIEVRNSCGQLKTLITSLGHPFCTTTGVELASELTLTSRLLTPESDCGINRINKQHGEIEVYNLHLSTDDPIKDLTESNSTMYAAGVLVGDSTMQYHYEEAYHHRSVNILNQLPEEWRQDYQNHIKTIR

SEQ ID NO: 106 - protein, 537 aa, Dickeya species
MLSEQNGSNDNGIIRTVIGQYANKGIVQVTSASPLLIQFYDIQLKLAGITPGLYPAFSQQWNNSKLHKNFTATLALGNSLSAFQIQSITSLNSSDGKNFTANAIGSLPVSATNVTQTLGIFDNAGNPVGTVQYKKHYIDAADCLIQASGIFPDSLINSAYPVTIIYTFSQTIAGQTVYGIEIVTTQSYPKKIINDSPTDINHNSQIKICLTRNDGDCDYWHNYDGNVSLPIKGSITYFGNIDVQNGMPVNAYSSIYIIRQSQGGSPIKPSGSFNFFTNAGTRINGSQLSWDLNWLDFSPPDFTSGERVYYVFKVTLQIAGQSVACFITNAPDNVLPSPPMLNTLKIKPMQIVYGCLGKDTRILMQDATEKALGEIRTGEWVYGRDGRRLRVENVTTGHETQYLDITVNHPDHPLQTITTSYGHPFYTSTGVKLARELTLADRLIGRSGECPIITITEQHQPIAVYNLHLSTDDPARDLGGNHGTMYANGLLVGDSLAQQQYEQAYKRRPVNVLGQLPPEWQQDYRNYMATRATVIQP

SEQ ID NO: 107 - protein, 526 aa, Unknown
  Spicies not identified
MTTQTYTADEKSIIKNVINQYGNKGVFIIEPGNTELVNFYDIQLKLSGLTSGRSPQFTQCWQETKRLKRSAGLLSQAATDTVRPVYSIVRVDTVDGKNYRTDAVGSLPVSATNVTQTLGLFDGEASNTGAVKYTQNFVNASDCVISADGVYPGVAGSPVTVIYTFAQTINNQTFYGAEIITTQSYPKEIFNDSPRTIKNPNEIKICLTRDEPDCDYRQTSSWDGIVSVPIKGYITYGGDIDVSGGKPVNGMSSIYLIRTRAGGDPILPYAGFDFFDAKNSSVAGNKINWDLNWLKFNKVNFDSGEMVYYVFKLILNVSGKSIAAFITNAPKNIVPGQMFLNTVTIKPMKIVYGCLHENTKIMMHDGSEKVISAIRTGDSVKTINNGSLRVENITTGQEQHCIKISARDRNNNTLNVITSPGHPFITTAGIIIARQLKLADKLLTLTGEAEITDIQPQNDEATVFNLQLSAEKTDENTLYANHILVGDIQMQRLHEDKYHQQPVNILSQLPEEWHEDYQNHLNATGE

SEQ ID NO: 108 - protein, 526 aa, Rahnella aquatilis
MTTQNYTADEKNIIKNVIHQYGNKGVFIIEPGNTELVNFYDIQLKLAGLTSGNYPQFTQHWQNTKQRKRSTGLLSQAGSSSAKPVYSIVRVDSTDGKNYRTDAVGSLPVSATNVTQTLGLFDGEATNTGTVKYTQDYVNTADCVISADGVYPGVAGSAVIVIYTFAQVINNQPFYGAEIITTQSYPKEIFNESPRTINNPNEIKICLTRNEADCDYRQSNPWDGIVSVPIKGNITYGGDIDVSGGKPVNGMSSIYLIRTRAGGDPILPYAGFDFFDAKNSSVAGNKINWDLNWLKFNKVDFESGEMVYYVFKLILNISGKSVAAFITNAPKNIVPGQMFLNTVTIKPMKIVYGCLHENTKIMMHDGSEKMISAIRTGDSVKTINNGSLIVENITTGQERHCIKISARDRGNNMLTVTSSPGHPFITPSGIIITRQLKLADKLLTLTGEAEITDIQPQKDEATVYNLQLSAEKTDENTLYANQILVGDIQMQRLHEDKYHQQPVNILSQLPKEWHEDYRNHLNVTGK

SEQ ID NO: 109 - protein, 526 aa, Rahnella aquatilis
MTTQNYTADEKNIIKNVIHEYGNKGVFIIEPGNTELVNFYDIQLKLAGLASGNYPQFTQHWQNTKQRKRSTGLLSQAASSSAKPVYSIVRVDSTDGKNYRTDAVGSLPVSATNVTQTLGLFDGEATNTGTVKYTQNYVNTADCVISADGVYPGVAGSAVIVIYTFAQVINNQTFYGAEIITTQSYPKEIFNESPRTINNPNEIKICLTRNEADCDYRQSNPWDGIVSVPIKGNITYGGDIDVSGGKPVNGMSSIYLIRTRAGGDPILPYAGFDFFDAKNSSVAGNKINWDLNWLKFNKVDFESGEMVYYVFKLILNISGKSVAAFITNAPKNIVPGQMFLNTVTIKPMKIVYGCLHENTKIMMHDGSEKMISAIRTGDSVKTINNGSLIVEHITTGQERHCIKISARDRDNNMLTVTSSPGHPFITPSGIIITRQLKLADKLLTLTGEAEITDIQPQKDEATVYNLQLSAEKTDDNTLYANQILVGDIQMQRLHEDKYHQQPVNILSQLPKEWHEDYRNHLNVTGK

SEQ ID NO: 110 - protein, 539 aa, Yersinia intermedia
MQPATPPSGKNSFSENNIISSVINKYANTGVFIINTNDPLLVKFYDIQLALAGISLVRYPNFSQLWVNHKLARHAVSSLAMGDSDSAQQVHSIVSLDSTDGQTFSANAIGSLPVSAVNITQTLGIFDESGSPTGTVQCKKNYIYTANCPIQADGTFPASLKQTRYPVNIIYTFAQTVNNQTVYGAEIVTTQSYPKLIQNDSPADLNKNNLIKICLARKENDCDYFNSFDGNVTVPIKGSVTYFGNIDLNNGKPINAYNSIYLVRERQGGDPITPASNFNFFDDVKTRINGNVLSWDLDWLKFKRPDFESGERVYYIFKVTLQIEGASVASFITNAPGQFDPEQRFLNTNTLKPMQITYGCLGKGTPILMQDGKEKAIDDILIGEWVQSQDGRALRVEDVITGAEQNYLEIEVRNSCGQLKTLITSLGHPFCTTTGVKLASELTLTSRLLTTESDCGINRINKQHGEIEVYNLHLSTDDPIKDLTESNSTMYAAGVLVGDSTMQYHYEEAYHHRSVNILNQLPEEWRQDYQNHIKTILKP

SEQ ID NO: 111 - protein, 532 aa, Enterobacter species
MTTLSYSNDDRDIVKKVIAQYGNKGTFAIDANDPLLVRFYAIQLALAGITPNNYPAFSRQWNDVMLLKSRPGKRDQASVNGAVPVYSIVDINSLDGRNYTADALGSLPTQATNVTQTLGLFDSDANSVGAVNYTKSYINAADCHIQASGVYSRAPQENTENVAVIYTFAQTINQQTVFGAEVIASQSYPKEIINTSPTDLKQNSQIKICLTREAADCDYWHDYNGVVSVPIKGQVTYLNNIDMNGGQPVNAWNAIYLIRTRAGGDPITPLSDVNVFNSPKTQINGNSISWDLDWLKFKTVDFQSGENVYYIFKMGVSVGGKNVASFITNAPKNVLPEQRFLNTFTIKPMQIVYGCLAKGTQVIMRDGSQKSIETIVPGEWVLSQQQRYLRVEDVIRGKESDCRVLHFTSPHGAQNLTASAGHPICTTLGVVLAKELTPQHRLITHEGEFTIDAIETTTHEQDVYNLHLSTDDPLADGLEGRSTLYANGVLVGDSQMQWQYEEEYNQRPVNVLAQLPDEWHQDYQNYRAVMRK

SEQ ID NO: 112 - protein, 537 aa, Unknown
  Spicies not identified
MQPATQPSGKNSFSENNIISSVINKYANTGVFIINTNDPLLVKFYDIQLALAGVSLVRYPNFSQLWVNNKLARHAVSSLAMGDSDSAQQVHSIVSLDSTDGQTFSANAIGSLPVSAVNITQTLGIFDESGSPTGTVQCKKNYIYTANCPIQADGTFPASLKQTRYPVNIIYTFAQTVNNQTVYGAEIVTTQSYPKLIQNDSPADLNKNNLIKICLARKENDCDYFNSFDGNVTVPIKGSVTYFGNIDLNNGKPINAYNSIYLVRERQGGDPITPASNFNFFDDAKTRINGNVLSWDLDWLKFKRPDFESGERVYYIFKVTLQIEGASVASFITNAPGQFDPEQRFLNTNTLKPMQITYGCLGKGTPILMQDGKEKAIDDILIGEWVQSQDGRALRVEDVITGAEQNYLEIEVRNSCGQLKTLITSLGHPFCTTTGVELASELTLTSRLLTPESDCGINRINKQHGEIEVYNLHLSTDDPIKDLTESNSTMYAAGVLVGDSTMQYHYEEAYHHRSVNILNQLPEEWRQDYQNHIKTIR

SEQ ID NO: 113 - protein, 537 aa, Unknown
  Spicies not identified
MQPATQPSGKNSFSENNIISSVINKYANTGVFIINTNDPLLVKFYDIQLALAGISLVRYPNFSQLWVNNKLARHAVSSLAMGDSDSAQQVHSIVSLDSTDGQTFSANAIGSLPVSAVNITQTLGIFDESGSPTGTVQCKKNYIYTANCPIQADGTFPASLKQTRYPVNIIYTFAQTVNNQTVYGAEIVTTQSYPKLIQNDSPADLNKNNLIKICLARKENDCDYFNSFDGNVTVPIKGSVTYFGNIDLNNGKPINAYNSIYLVRERQGGDPITPASNFNFFDDAKTRINGNVLSWDLDWLKFKRPDFESGERVYYIFKVTLQIEGASVASFITNAPGQFDPEQRFLNTNTLKPMQITYGCLGKGTPILMQDGKEKAIDDILIGEWVQSQDGRALRVEDVITGAEQNYLEIEVRNSCGQLKTLITSLGHPFCTTTGVELASELTLTSRLLTPESDCGINRINKQHGEIEVYNLHLSTDDPIKDLTESNSTMYAAGVLVGDSTMQYHYEEAYHHRSVNILNQLPEEWRQDYQNHIKTIR

SEQ ID NO: 114 - protein, 537 aa, Unknown
  Spicies not identified
MQPATQPSGKNSFSENNIISSVINKYANTGVFIINTNDPLLVKFYDIQLALAGVSLVRYPNFSQLWVNNKLARHAVSSLAMGDSDSAQQVHSIVSLDSTDGQTFSANAIGSLPVSAVNITQTLGIFDESGSPTGTVQCKKNYIYTANCPIQADGTFPASLKQTRYPVNIIYTFAQTVNNQTVYGAEIVTTQSYPKLIQNDSPADLNKNNLIKICLARKENDCDYFNSFDGNVTVPIKGSVTYFGNIDLNNGKPINAYNSIYLVRERQGGDPITPASNFNFFDDAKTRINGNVLSWDLDWLKFKRPDFESGERVYYIFKVTLQIEGASVASFITNAPGQFDPEQRFLNTNTLKPMQITYGCLGKGTPILMQDGKEKAIDDILIGEWVQSQDGRALRVEDVITGAEQNYLEIEVRNSCGQLKTLITSLGHPFCTTTGVELASELTLTSRLLTPESDCGINRINKRHGEIEVYNLHLSTDDPIKDLTESNSTMYAAGVLVGDSTMQYHYEEAYHHRSVNILNQLPEEWRQDYQNHIKTIR

SEQ ID NO: 115 - protein, 542 aa, Unknown
  Spicies not identified
MNADSLLSEQNGSNDNGIIRTVIGQYANKGIVQVTSASPLLIQFYDIQLKLAGITPGLYPAFSQQWNNSKLHKNFTATLALGNSLSAFQIQSITSLNSSDGKNFTANAIGSLPVSATNVTQTLGIFDNAGNPVGTVQYKKHYIDAADCLIQASGIFPDSLINSAYPVTIIYTFSQTIAGQTVYGIEIVTTQSYPKKIINDSPTDINHNSQIKICLTRNDGDCDYWHNYDGNVSLPIKGSITYFGNIDVQNGMPVNAYSSIYIIRQSQGGSPIKPSGSFNFFTNAGTRINGSQLSWDLNWLDFSPPDFTSGERVYYVFKVTLQIAGQSVACFITNAPDNVLPSPPMLNTLKIKPMQIVYGCLGKDTRILMQDATEKALGEIRTGEWVYGRDGRRLRVENVTTGHETQYLDITVNHPDHPLQTITTSYGHPFYTSTGVKLARELTLADRLIGRSGECPIITITEQHQPIAVYNLHLSTDDPARDLGGNHGTMYANGLLVGDSLAQQQYEQAYKRRPVNVLGQLPPEWQQDYRNYMATRATVIQP

SEQ ID NO: 116 - protein, 537 aa, Unknown
  Spicies not identified
MQPATPPSGKNSFSENNIISSVINKYANTGVFIINTNDPLLVKFYDIQLALAGISLVRYPNFSQLWVNHKLARHSVSSLAMGDSDSAQQVHSIVSLDSTDGQTFSANAIGSLPVSAVNITQTLGIFDESGSPTGTVQCKKNYIYTANCPIQADGTFPASLKQTRYPVNIIYTFAQTVNNQTVYGAEIVTTQSYPKLIQNDSPADLNKNNLIKICLARKENDCDYFNSFDGNVTVPIKGSVTYFGNIDLNNGKPINAYNSIYLVRERQGGDPITPASNFNFFDDVKTRINGNVLSWDLDWLKFKRPDFESGERVYYIFKVTLQIEGASVASFITNAPGQFDPEQRFLNTNTLKPMQITYGCLGKGTPILMQDGKEKAIDDILIGEWVQSQDGRALRVEDVITGAEQNYLEIEVRNSCGQLKTLITSLGHPFCTTTGVKLASELTLTSRLLTTECDCGINRINKQHGEIEVYNLHLSTDDPIKDLTESNSTMYAAGVLVGDSTMQYHYEEAYHHRSVNILNQLPEEWRQDYQNHIKTIR

SEQ ID NO: 117 - protein, 529 aa, Erwinia species
MNAQSYTSDEKSIVKTVIRKYGNKGGFIIDPGDPLLVSFYDIQQKLAGLDSGNYPHFIQRWQNTKQCKHSTGLVSQAATRSAEAVYSIVRLDSTDGKYYRTDAIGSLPVSATNVTQTLGLFDNDASNTGTVKHTQNYINTADCIISANGVYPDSAKENGNPVTAIYTFSQTIANKTIYGAEIITTQSYPKEIHNQSPTTIHNPNEIKICLTRDEADCDYSQPYAGGGIVSVPVKGTITYGGNIDVSGGRPVNGMSSIYLIRARAGGDPIFPSAGFDFFDPKNSSAVADKISWDLSWLNFNRVDFDSGERVYYIFKLILSVSGKSVAAFITNAPKNILPEQKFLNTLNIKPMKIVYGCLHENTKIMMHDGSEKLISAIEMGESVLTANDSALMVENITTGQEQHCIKISVKDEDNNKHSVIASPGHPFITASGVVTCRELKLSDQLFTPQGKCEITDIQPQTDELTVYNLQLSAEKVDENILYANHILVGDIQMQRFYEDEYYERPVNILSKLPREWHEDYLNHLKSTGE

SEQ ID NO: 118 - protein, 526 aa, Unknown
  Spicies not identified
MPDANMSPLENQVIKSVINQYANQGIFNLDLDDPLLAEFYALQLRLAEVNSHRYPAFMQQYQHSQRNILRGSLSQAESDNAKPVYSLFALGRDTNGTATASALASLPVSATNVTQTLGFFDNQGQSKGKVALNKSYITTSNCVIQAEGAADAQLDNNCVIYTFSQTINGATSYGAEIVYNQSYPQLITNDSPKALTNQQLIKVCLSRNEIDCTYFDHGGPWGGVVRVPIKGSITYFDNIDMQGGKPVNAFNDIYLVRERAGGSPTASVISNPIFNTAGTTCAGNKISWDLDWLPFKQVDFSSGERVYYIFKVSLSVGGRDIVTFITNAPASVVPEQPFLNTQKIPPMQIVYGCLGGDSLIQLEDGSEKPLREMRIGEWVRSHDQRSLRVEDVPVGKEPQALQITLQKQQIIATSGHPFCTPQGILLARELEPGQKLLTAQGEGEVVAITPLDHEIDVFNLHLSCDDPIGAGLEGNSTFYANGILVGDSQMQRDYEDAWHQRPVNVLAELPPEWHQDYHNYLAANRR

SEQ ID NO: 119 - protein, 526 aa, Unknown
  Spicies not identified
MPDANMSPLENQVIKSVINQYANQGMFNLDLDDPLLAEFYALQLRLADVNNHSYPAFMQQYQHSQRSTLRGSLSQAESDNAKPVYSLFALGRDTGGTATASALASLPVSATNVTQTLGFFDYQGQSKGKVALNKSYINTSNCVIQAEGAADAQLDNNCVIYTFSQTINGATSYGAEIVYNQSYPQQINNDSPEALTNQQLIKVCLSRNEIDCTYFDHGGPYGGVVRVPIKGSITYFDNIDMQGGKPVNAYNDIYLVRERAGGSPITSVISNPIFNAAGTSYAGNKISWDLDWLPFKQVDFSSGERVYYIFKASLSVGGRDIVTFITNAPASVVPEQPFLNTKKIAPMQIVYGCLGGDSLIQLEDGSEKPLREMRIGEWVRSHDQRSLRVEDVPVGKEPQALQITLKKQQIIATSGHPFCTPQGILLARELVSGQKLLTAQGEAEVVAITPLDHEIDVFNLHLSCDDPIGAGLEGNSTFYANGILVGDSQMQRDYEDAWHQRPVNVLAELPLEWHQDYHNFLAASRR

SEQ ID NO: 120 - protein, 571 aa, Enterobacter oryzendophyticus
MQKLIDHFYYSNKSVFINIIILSSRMGMGHLFPRFLDYCMTTLSYSNDDRDIVKKVIAQYGNKGTFAIDANDPLLVRFYAIQLALAGITPNNYPAFSRQWNDVMLLKSRPGKRDQASVNGAVPVYSIVDINSLDGRNYTADALGSLPTQATNVTQTLGLFDSDANSVGTVNYTKSYINATDCHIQASGVYSRAPQENTENVAVIYTFAQTINQQTVFGAEVIASQSYPKEIINTSPTDLKQNSQIKICLTREAADCDYWHDYNGVVSVPIKGQVTYLNNIDMNGGQPVNAWNAIYLIRTRAGGDPITPLSDVNVFNSPKTQINGNSISWDLDWLKFKTVDFQSGENVYYIFKMGVSVGGKNVASFITNAPKNVLPEQRFLNTFTIKPMQIVYGCLAKGTQVIMRDGSQKSIETIVPGEWVLSQQQRYLRVEDVIRGKESDCRVLHFTSPHGAQNLTASAGHPICTTLGVVLAKELTPQHRLITHEGEFTIDAIETTTHEQDVYNLHLSTDDPLADGLEGRSTLYANGVLVGDSQMQWQYEEEYNQRPVNVLAQLPDEWHQDYQNYRAVMRK

SEQ ID NO: 121 - protein, 146 aa, Haemophilus piscium
MNAITDTKTGLFLASFEIGKAMPGAQLLHLNLAVYTPGETVNGVAHLTQATNPPLDMASELKGQYTYMCVMPKLCHILVTAQGYPIIKWPQGGGIGPVIQPNFELRMVLSEDWKSGTANYKYQDSHQVWHEVKDAPVNLVPAAVLA

SEQ ID NO: 122 - protein, 146 aa, Aeromonas salmonicida
MNAITDTKTGLFLASFEIGKAMPGAQLLHLNLAVYTPGETVNGVAHLTQATNPPLDMASELKGQYTYMCVMPKQCHILVTAQGYPIIKWPQSGGIGPVIQPNFELRMVLGEDWKSGTANYKYQDNHQVWHEVKDAPVTLVPAAVLA

SEQ ID NO: 123 - protein, 146 aa, Aeromonas salmonicida
MNAITDTKTGLFLASFEIGKAMPGAQLLHLNLAVYTPGETVNGIAHLTQATNPPLDMASELKGQYTYMCVMPKQCHILVTAQGYPIIKWPQSGGIGPVIQPNFELRMVLGEDWKSGTANYKYQDNHQVWHEVKDAPVTLVPAAVLA

SEQ ID NO: 124 - protein, 146 aa, Aeromonas salmonicida
MNAITDTKTGLFLASFEIGKAMPGAQLLHLNLAVYTPGETVNGVAHLTQATNPPLDMASELKGQYTYMCVMPKQCHILVTAQGYPIIKWPQSGGIGPVIQPNFELRMVLGEDWKSGTANYKYQDNHQGWHEVKDAPVTLVPAAVLA

SEQ ID NO: 125 - protein, 146 aa, Aeromonas piscicola
MNAITDTKTGLFLASFEIGKAMPGAQLLHLNLAVYTPGETVNGVAHLTQATNPPLDMASELKGQYTYMCVMPKQCHILVTAQGYPIIKWPQGGGMGPVIQPNFELRMVLSEDWKSGTANYKYQDNHQVWHEVKDAPVNLVPAAVLA

SEQ ID NO: 126 - protein, 146 aa, Aeromonas tecta
MNAITDTKTGLFLASFDIGKSMPGAPLLRLNLTVFTPGETVSGVAHLTQATNPELDLASDLKGQYTYMCVMPKLCHILVTAQGYPIIKWPQGAGIGPVIQPNFELRMVLSEDWKSGTANYKYQDSRQVWHEVKDAPVTLVPATVLA

SEQ ID NO: 127 - protein, 146 aa, Unknown
  Spicies not identified
MNAITDTKTGLFLASFEIGKAMPGAQLLHLNLAVYTPGETVNGVAHLTQATNPPLDMASELKGQYTYMCVMPKLCHILVTAQGYPIIKWPQGGGIGPVIQPNFELRMVLSEDWKSGTANYKYQDNHQVWHEVKDAPVNLVPAAVLA

SEQ ID NO: 128 - protein, 146 aa, Unknown
  Spicies not identified
MNAITDTKTGLFLASFEIGKAMPGAQLLHLNLAVYTPGETVNGVAHLTQATNPPLDMASELKGQYTYMCVMPKLCHILVTAQGYPIIKWPQGGGIGPVIQPNFELRMVLSEDWKSGTANYKYQDSHQVWHEVKDAPVKLVPAAVLA

SEQ ID NO: 129 - protein, 146 aa, Unknown
  Spicies not identified
MNAITDTKTGLFLASFEIGKAMPGAQLLHLNLAVYTPEETVNGVAHLTQATNPPLDMASELKGQYTYMCVMPKLCHILVTAQGYPIIKWPQGGGIGPVIQPNFELRMVLSEDWKSGTANYKYQDSHQVWHEVKDAPVNLVPAAVLA

SEQ ID NO: 130 - protein, 146 aa, Unknown
  Spicies not identified
MNAITDTKTGLFLASFEIGKAMPGAQLLHLNLAVYTPGETVNGVAHLTQATNPPLDMASELKGQYTYMCVMPKQCHILVTAQSYPIIKWPQSGGIGPVIQPDFELRMVLGEDWKSGTANYKYQDNHQVWHEVKDAPVTLVPAAVLA

SEQ ID NO: 131 - protein, 146 aa, Unknown
  Spicies not identified
MNAITDTKTGLFLASFEIGKAMPGAQLLHLNLAVYTPGETINGVAHLTQATNPPLDMASELKGQYTYMCVMPKQCHILVTAQGYPIIKWPQSGGIGPVIQPNFELRMVLGEDWKSGTANYKYQDNHQVWHEVKDAPVTLVPAAVLA

SEQ ID NO: 132 - protein, 146 aa, Unknown
  Spicies not identified
MNAITDTKTGLFLASFEIGKAMPGAQLLHLNLAVYTPGETVNGVAHLTQSTNPPLDMASELKGQYTYMCVMPKQCHILVTAQGYPIIKWPQSGGIGPVIQPNFELRMILGEDWKSGTANYKYQDNHQVWHEVKDAPVTLVPAAVLA

SEQ ID NO: 133 - protein, 146 aa, Aeromonas piscicola
MNAITDTKTGLFLASFEIGKAMPGAQLLHLNLTVYTPGETVNGVAHLTQATNPPLDMASELKGQYTYMCVMPKQCHILVTAQGYPIIKWPQGGGIGPVIQPNFELRMVLSEDWKSGTANYKYQDSHQVWHEVKDAPVNLVPAAVLA

SEQ ID NO: 134 - protein, 150 aa, Aeromonas diversa
MNAPIDTQINTKTGLFLASFQIGKAMPGAPLLHLNLAVYTPGETVTGVSHVTQATNPPLDVASELKGQYTYMTVMPNKSHILVTAQGYPIVKWPQHGGLGPVIQPNLELRMVLSDDWKSGTANYKYQDGNQVWHEVKDVPVTLVPAAVLA

SEQ ID NO: 135 - protein, 145 aa, Clostridiales bacterium
MKIKSKKELGLFRVCYEIGGDKPGAPLFRIDFSVYTPEETMSGIGHITQATNPPLNIGSDIHGQYTYMCVMPDKCHILITATGNPIIKWPKHGGVGPILPTNIELKMVVTEDWKSGTANYKYIDAEGNWHEVTDAPVKSVPGQNI

SEQ ID NO: 136 - protein, 369 aa, Aeromonas salmonicida
MTTITTLDLGDQGLLAAYLSAASPALLNQSYANLLLMQQSLARSELDSSLAVKIEAYQAQMLNQARYYQQDNLPGLIHLMSYGSNFYALVAAFNRLLGQDDDAAVLAGRTKLAEQLTSLADQARSYQLLAQTLNTRVQVAWGSLRPLMDNFLGVITQLEQDLIADAQRQAKAIDALNQAIAANIQAIVDEGGKAGEGVSQLGHAIVTSLALEEKPAAKPAASQGTAKGSDQQTQYMIAGIQALSSGIAGASLAAKELKANTQKLAQAYQALAETNAMLTVAKSVQAQNQLFVSTYETVARAITGLPSGWQKVADAYQSAVPIVADLSNDGDVRLLRRTLALDTQSWQLLSDQVNDIKTAYAGNGVLPDA

SEQ ID NO: 137 - protein, 358 aa, Aeromonas salmonicida
MINATISMDQSMAGQAGQALQIQTYCNSVKQQVSVDFSQFPNLKDNQTQINQGLDVAKGHADLYLNQIQPQIITNISNISNYYALQNAIPTVLPPGSTKAQWLRQLNVIKEQATEYHKVSSDTRLIILDLNNNLITDSRNFQGIVVNLNSKVQGDNGVLAQLNGDIDKVNAAIDGAIAGIVVGGLLVIGGAFVTAIGAVADFVTAGTSTPVVIGGVAMMVAGAAGITAGSIVLHNSLGARQDLYQKRSNLNSEVLIATQIGNGYKGLQVQAQNAVNAATQMSNAWDALTSDLGSLITDLDKGITSGDDIRQLWLTAADTTVKTVLVDVNTIKAQMAGVSPMQVPATATIADFVGRLAA

SEQ ID NO: 138 - protein, 266 aa, Aeromonas salmonicida
MSNGILSQSIANMQQAEAVIQSFTGLPQNAVNIQQNVEEVVAALLPLVQTMQQQVLAFGARLEVQLTQQLANTGPFNPEALKAFVDLVQQEIAPIQTLTAQTLTASQTANDRITQDNIALQRIGVELQATIAGLQSNLAGARQELDSLNKKKLYLLGLGLLGLPGLIALAVTLTQTQNKVNSLEGQVNQIEGQIQRQQGFLGQTTAFSQQFGSLIDRVSKVGNTITLLGGDIANVARDAGQGDPELARLFFTAALTEVRTLQVDAS

SEQ ID NO: 139 - protein, 369 aa, Aeromonas salmonicida
MTTITTLDLGDQGLLAAYLSAASPALLNQSYANLLLMQQSLARSELDSSLAVKIEAYQAQMLNQARYYQQDNLPGLIHLMSYGSNFYALVAAFNRLLGQDDDAAVLAGRAKLAEQLTSLADQARSYRLLAQTLNTRVQVAWGSLRPLMENFLGVITQLEQDLIADAQRQAKAIDALNQAIAANIQAIVDEGGKAGEGVSQLGHAIVTSLALEEKPAAKPAASQGTAKGSDQQTQYMIAGIQALSSGIAGASLAAKELKANTQKLAQAYQALAETNAMLTVAKSVQAQNQLFVSTYETVARAITGLPSGWQKVADAYQSAVPIVADLSNDGDVRLLRRTLALDTQSWQQLSDQVNDIKTAYAGNGVLPDA

SEQ ID NO: 140 - protein, 369 aa, Aeromonas salmonicida
MTTITTLDLGDQGLLAAYLSAASPALLNQSYANLLLMQQSLARSELDSSLAVKIEAYQAQMLNQARYYQQDNLPGLIHLMSYGSNFYALVAAFNRLLGQDDDAAVLAGRAKLAEQLTSLADQARSYRLLAQTLNTRVQVAWGSLRPLMENFLGVITQLEQDLIADAQRQAKAIDALNQAIAANIQAIVDEGGKAGEGVSQLGHAIVTSLVLEEKPAAKPAASQGTAKGSDQQTQYMIAGIQALSSGIAGASLAAKELKANTQKLAQAYQALAETNAMLTVAKSVQAQNQLFVSTYETVARAITSLPSGWQKVADAYQSAVPIVADLSNDGDVRLLRRTLALDTQSWQLLSDQVNDIKTAYAGNGVLPDA

SEQ ID NO: 141 - protein, 373 aa, Aeromonas salmonicida
MTTITTLDLGDQGLLAAYLSAASPALLNQSYANLLLMQQSLARSELDSSLAVKIEAYQAQMLNQARYYQQDNLPGLIHLMSYGSNFYALVAAFNRLLGQDDDAAVLAGRAKLAEQLTSLADQARSYRLLAQTLNTRVQVAWGLLRPLMDNFLGVITQLEQDLIADAQRQAKAIDALNQAIAANIQAIVDEGGKAGEGVSQLGHAIVTSLALEEKPAAKPAVKPAASQGTAKGSDQQTQYMIAGIQALSSGIAGASLAAKELKANTQKLAQAYQALAETNAMLTVAKSVQAQNQLFVSTYETVARAITGLPSGWQKVADAYQSAVPIVADLSNDGDVRLLRRTLALDTQSWQQLSDQVNDIKTAYAGNGVLPDA

SEQ ID NO: 142 - protein, 369 aa, Haemophilus piscium
MTTITTLDLGDQGLLAAYLSAASPALLNQSYANLLLMQQSLARSELDSSLAVKIEAYQAQMLNQARYYQQDNLPGLIHLMSYGSNFYALVAAFNRLLGQDDDAAVLAGRAKLAEQLTSLADQARSYRLLAQTLNTRVQVAWGSLRPLMDNFLGVITQLEQDLIADAQRQAKAIDALNQAIAANIQAIVDEGGKAGEGVSQLGHAIVTSLALEEKPAAKPVASQGTAKGPDQQTQYMIAGIQALSSGIAGASLAAKELKANTQKLAQAYQALAETNAMLTVAKSVQAQNQLFVSTYETVARAITGLPSGWQKVADAYQSAVPIVADLSNDGDVRLLRRTLALDTQSWQLLSDQVNDIKTAYAGNGVLPDA

SEQ ID NO: 143 - protein, 369 aa, Aeromonas popoffii
MTTITTLDLGDQGLLAAYLSAASPALLNQSYANLLLMQQSLARSELDSSLAVKIEAYQAQMLNQARYYQQDNLPGFINLMSHGSNFYALVAAFNRLLGQDDDAAVLAGRARLAEQLTSLADQAQSYRLTAQALNTRFQIAWGSLRPLMDNFLGVITRLEQDLIADAQRQAKAIDALNQAIAANIQAIVDEGGKAGDGVGQLGRAIVTSLALEETPAGKPAASQSSAKGSDQQTQYMISGIQALSSGIAGASLAAKELKANTQKLALAYQALAETNAILTVAKSVQAQNQLFVSTYETVARAITGLPLGWQKVADAYQSAVPVVADLNNSGDVRLLRRTLALNTQSWQQLSDQVSDIKAAYAGNGVLPDA

SEQ ID NO: 144 - protein, 369 aa, Unknown
  Spicies not identified
MTTITTLDLGDQGLLAAYLSAASPALLNQSYANLLLMQQSLARSELDSSLAVKIEAYQAQMLNQARYYQQDNLPGLIHLMSYGSNFYALVAAFNRLLGQDDDAAVLAGRAKLAEQLTSLADQARSYRLLAQTLNTRVQVAWGSLHPLMDNFLGVITQLEQDLIADAQRQAKAIDALNQAIAANIQAIVDEGGKAGEGVSQLGHAIVTSLALEEKPAAKPAANQGTAKGPDQQTQYMIAGIQALSSGIAGASLAAKELKANTQKLAQAYQALAETNAMLTVAKSVQAQNQLFVSTYETVARAITGLPSGWQKVADAYQSAVPIVADLSNDGDVRLLRRTLALDTQSWQQLSDQVNDIKTAYAGNGVLPDA

SEQ ID NO: 145 - protein, 369 aa, Unknown
  Spicies not identified
MTTITTLDLGDQGLLAAYLSAASPALLNQSYANLLLMQQSLARSELDSSLAVKIEAYQAQMLNQARYYQQDNLPGLIHLMSYGSNFYALVAAFNRLLGQDDDAAVLAGRAKLAEQLTSLADQARSYRLLAQTLNTRVQVAWGSLRPLMDNFLGVITQLEQDLIADAQRQAKAIDALNQAIAANIQAIVDEGGKAGEGVSQLGHAIVTSLALEEKPAAKPAANQGTAKGSDQQTQYMIAGIQALSSGIAGASLAAKELKANTQKLAQAYQALAETNAMLTVAKSVQAQNQLFVSTYETVARAITGLPSGWQKVADAYQSAVPIVADLSNDGDVRLLRRTLALDTQSWQLLSDQVNDIKTAYAGNGVLPDA

SEQ ID NO: 146 - protein, 369 aa, Aeromonas piscicola
MTTITTLDLGDQGLLAAYLSAASPALLNQSYANLLLMQQSLARSELDSSLAVKIEAYQAQMLNQARYYQQDNLPGLIHLMSYGSNFYALVAAFNRLLGQDDDAAVLTGRAKLAEQLTSLADQARSYRLLAQTLNTRVQIAWGSLRPLMDNFLGVITQLEQDLIADAQRQAKAIDALNQAIAANIQAIVDEGGKAGDGVSQLGHAIVTSLALEEKPAGKPAANPGSTKGSDQQTQYMISGIQALSSGIAGASLAAKELKANTQKLAQAYQALAETNAMLTVAKSVQAQNQLFVSTYETVARAITGLPSGWQKVADAYQNAVPVVADLSNDGDVRLLRRTLALNTQSWQLLSDQVNDIKTAYAGNGVLPDA

SEQ ID NO: 147 - protein, 369 aa, Aeromonas bestiarum
MTTITTLDLGDQGLLAAYLSAASPALLNQSYANLLLMQQSLARSELDSSLAVKIEAYQAQMLNQARYYQQDNLPGLIHLMSYGSNFYALIAAFNRLLGQDDDAAVLAGRAKLAEQLTSLADQARSYRLLAQTLNTRVQVAWGSLRPLMDNFLGVITQLEQDLIADAQHQAKAIDALNQAIAANIQAIVDEGGKAGEGVSQLGHAIVTSLALEEKPAAKPAASQGTAKGSDQQTQYMISGIQALSSGIAGASLAAKELKANTQKLAQAYQALAETNAMLTVAKSVQAQNQLFVSTYETVARAITGLPSGWQKVADAYQSAVPVVADLSNDGDVRLLRRTLALDTQSWQLLSDQVNDIKTAYAGNGVLPDA

SEQ ID NO: 148 - protein, 366 aa, Unknown
  Spicies not identified
MTTITTLDLGDQGLLAAYLSAASPALLNQSYANLLLMQQSLARSELDSSLAVKIEAYQAQMLNQARYYQQDNLPGLIHLMSYGSNFYALVAAFNRLLGQDDDAAGRAKLAEQLTSLADQALSYRLLAQTLNTRVQVAWGSLRPLMDNFLGVITQLEQDLIADAQRQAKAIDALNQAIAANIQAIVDEGGKAGEGVSQLGHAIVTSLALEEKPAAKPAASQGTAKGSDQQTQYMIAGIQALSSGIAGASLAAKELKANTQKLAQAYQALAETNAMLTVAKSVQAQNQLFVSTYETVARAITGLPSGWQKVADAYQSAVPIVADLSNDGDVRLLRRTLALDTQSWQLLSDQVNDIKTAYAGNGVLPDA

SEQ ID NO: 149 - protein, 369 aa, Unknown
  Spicies not identified
MTTITTLDLGDQGLLAAYLSAASPALLNQSYANLLLMQQSLARSELDSSLAVKIEAYQAQMLNQARYYQQDNLPGLIHLMSYGSNFYALVAAFNRLLGQDDDAAVLAGRTKLAEQLTSLADQARSYRLLAQTLNTRVQVAWGSLRPLMDNFLGVITQLEQDLIADAQRQAKAIDALNQAIAANIQAIVDEGGKAGEGVSQLGHAIVTSLALEEKPAAKPAASQGTAKGSDQQTQYMIAGIQALSSGIAGASLAAKELKANTQKLAQAYQALAETNAMLTVAKSVQAQNQLFVSTYETVARAITGLPSGWQKVADAYQSAVPIVADLSNDGDVRLLRRTLALDTQSWQLLSDQVNDIKTAYAGNGVLPDA

SEQ ID NO: 150 - protein, 369 aa, Unknown
  Spicies not identified
MTTITTLDLGDQGLLAAYLSAASPALLNQSYANLLLMQQSLARSELDSSLAVKIEAYQAQMLNQARYYQQDNLPGLIHLMSYGSNFYALVAAFNRLLGQDDDAAVLAGRAKLAEQLTSLADQARSYRLLAQTLNTRVQVAWGSLRPLMDNFLGVITQLEQDLIADAQRQAKAIDALNQAIAANIQAIVDEGGKAGEGVSQLGHAIVTSLALEEKPAAKPAASQGTAKGPDQQTQYMIAGIQALSSGIAGASLAAKELKANTQKLAQAYQALAETNAMLTVAKSVQAQNQLFVSTYETVARAITGLPSGWQKVADAYQSAVPIVADLSNDGDVRLLRRTLALDTQSWQLLSDQVNDIKTAYAGNGVLPDA

SEQ ID NO: 151 - protein, 369 aa, Aeromonas piscicola
MTTITTLDLGDQGLLAAYLSAASPALLNQSYANLLLMQQSLARSELDSSLAVKIEAYQAQMLNQARYYQQDNLPGLIHLMSYGSNFYALVAAFNRLLGQDDDAAVLTGRAKLAEQLTSLADQARSYRLLAQTLNTRVQIAWGSLRPLMDNFLGVITQLEQDLIADAQRQAKAIDALNQAIAANIQAIVDEGGKAGDGVSQLGHAIVTSLALEEKPAGKPAANPGSTKGSDQQTQYMISGIQALSSGIAGASLAAKELKANTQKLAQAYQALAETNAMLTVAKSVQAQNQLFVSTYETVARAITGLPSGWQKVAEAYQNAVPVVADLSNDGDVRLLRRTLALDTQSWQQLSDQVNDIKTAYAGNGVLPDA

SEQ ID NO: 152 - protein, 372 aa, Aeromonas hydrophila
MTTIATLDLGDQGLLAAYLSATSPALLNQTYANLLLMQQSLANSEIDSTLAVKIEAYQAQMMNQARYYQQTNLSGLIHLLSNGSNFYALVAAFNRLLGQEDDAAVLAGGARLGQQLTSLVDQAQSYRLNAQALNTRVQVAWGSLRPLMTQFNGVITQLEQDLMADAKRQTEIIDALNQAIAANIQAIVDEGGKAGEGVNQLGRAIVTSLTLEQKPADKGAKPATSQEIAKETDQQTQYMISGLKALSSGIAGSSQAARELKTNTDKLAQAYQALAATNTLLTVAKSVQAQNQLFVDTYNRVADTITQLPAGWQKVADAYQGAVPVVTDLNSPDDVRQLRRTVALNTQSWQLLSSQVDDIKAAYAGNGILPDA

SEQ ID NO: 153 - protein, 372 aa, Aeromonas hydrophila; identical to SEQ ID NO: 152

SEQ ID NO: 154 - protein, 372 aa, Aeromonas hydrophila
MTTISTLDLGDQGLLADYLSATSPALLNQTYANLLLMQQSLANSEIDSTLAVKIEAYQAQMMSQARYYQQTNLSGLIHLLSNGSNFYALVAAFNRLLGQEEDAAVLAGRARLAEQLTSLADQALSYRLNAQTLNTRVQVAWGSLRPLMEQFNGVITQLEQDLMADAKRQTEIIDALNQAIAANIQAIVDEGGKAGEGVNQLGRAIVTSLTLEQKPADKEAKPATSQEIAKQTDQQTQYMVSGLKAISSGIAGSSLAARELKTNTDKLAEAYQALAATNTLLTVAKSVQAQNQLFVDTYSRVADAVTQLPAGWQKVADAYQGAVPVVADLNSPDDVRQLRRTVALNTQSWLLLAGQVDDIKAAYAGNGILPDA

SEQ ID NO: 155 - protein, 372 aa, Aeromonas hydrophila
MTTIATLDLGDQGLLAAYLSATSPALLNQTYANLLLMQQSLANSEIDSTLAVKIEAYQAQMMSQARYYQQTNLSGLIHLLSNGSNFYALIAAFNRLLGQEEDAAVLAGRARLAEQLTSLADQALSYRLNAQALNTRVQVAWGSLRPLMEQFNGVITQLEQDLMADAKRQTEIIDALNQAIAANIQAIVDEGGKAGEGVNQLGRAIVTSLTLEQKPADKEAKPATSQEIAKQTDQQTQYMVSGLKAISSGIAGSSLAARELKTNTDKLAEAYQALAATNTLLTVAKSVQAQNQLFVDTYSRVADAVTQLPAGWQKVADAYQGAVPVVSDLNSPDDVRQLRRTVALNTQSWLLLAGLVDDIKAAYAGNGILPDA

SEQ ID NO: 156 - protein, 372 aa, Aeromonas hydrophila
MTTIATLDLGDQGLLAAYLSATSPALLNQTYANLLLMQQSLANSEIDSTLAVKIEAYQAQMMNQARYYQQTNLSGLIHLLSNGSNFYALVAAFNRLLGQEDDAAVLAGGARLGQQLTSLVDQAQSYRLNAQALNARVQVAWGSLRPLMTQFNGVITQLEQDLMADAKRQTEIIDALNQAIAANIQAIVDEGGKAGEGVNQLGRAIVTSLTLEQKPADKGAKPATSQEIAKETDQQTQYMISGLEALSSGIAGSSQAARELKTNTDKLAQAYQALAATNTLLSVAKSVQAQNQLFVDTYSRVADTVTQLPAGWQKVADAYQGAVPVVTDLNSPDDVRQLRRTVALNTQSWQLLSSQVDDIKAAYAGNGILPDA

SEQ ID NO: 157 - protein, 372 aa, Aeromonas hydrophila
MTTIATLDLGDQGLLAAYLSATSPALLNQTYANLLLMQQSLANSEIDSTLAVKIEAYQAQMMNQARYYQQTNLSGLIHLLSNGSNFYALVAAFNRLLGQEDDAAVLAGGARLGQQLTSLVDQAQSYRLNAQALNTRVQVAWGSLRPLMTQFNGVITQLEQDLMADAKRQTEIIDALNKAIAANIQAIVDEGGKAGEGVNQLGRAIVTSLTLEQKPADKGGKPATSQEIAKETDQQTQYMISGLKALSSGIAGSSQAARELKTNTDKLAQAYQALAATNTLLSVAKSVQAQNQLFVDTYSRVADTVTQLPAGWQKVADAYQGAVPVVTDLNSLDDVRQLRRTVALNTQSWQLLSSQVDDIKAAYAGNGILPDA

SEQ ID NO: 158 - protein, 372 aa, Aeromonas hydrophila
MTTIATLDLGDQGLLAAYLSATSPALLNQTYANLLLMQQSLANSEIDSTLAVKIEAYQAQMMSQARYYQQTNLSGLIHLLSNGSNFYALVAAFNRLLGQEDDAAVLAGGARLGLQLTSLVDQAQSYRLNAQALNTRVQVAWGSLRPLMTQFNGVITQLEQDLMADAKRQTEIIDTLNKAIAANIQAIVDEGGKAGEGVNQLGRAIVTSLTLEQKPADKGAKPATSQEIAKETDQQTQYMISGLEALSSGIAGSSQAARELKTNTDKLAQAYQALAATNTLLTVAKSVQAQNQLFVDTYSRVADTVTQLPAGWQKVADAYQGAVPVVTDLNSPDDVRQLRRTVALNTQSWQLLSSQVDDIKAAYAGNGILPDA

SEQ ID NO: 159 - protein, 372 aa, Aeromonas species
MTTIATLDLGDQGLLAAYLSATSPALLNQTYANLLLMQQSLANSEIDSTLAVKIEAYQAQMMSQARYYQQTNLSGLIHLLSNGSNFYALVAAFNRLLGQEEDAAVLAGRARLAEQLTSLADQALSYRLNAQTLNTRVQVAWGSLRPLMEQFNGVITQLEQDLMADAKRQTEIIDALNQAIAANIQAIVDEGGKAGEGVNQLGRAIVTSLTLEQKPADKEAKPATSQEIAKQTDQQTQYMVSGLKAISSGIAGSSLAARELKTNTDKLAEAYQALAATNTLLSVAKSVQAQNQLFVDTYSRVADAVTQLPAGWQKVADAYQGAVPVVADLNSPDDVRQLRRTVALNTQSWLLLAGQVDDIKAAYAGNGILPDA

SEQ ID NO: 160 - protein, 372 aa, Aeromonas hydrophila
MTTIATLDLGDQGLLAAYLSATSPALLNQTYANLLLMQQSLANSEIDSTLAVKIEAYQAQMMSQARYYQQTNLSGLIHLLSNGSNFYALIAAFNRLLGQEEDAAVLAGRARLAEQLTSLADQALSYRLNAQALNTRVQVAWGSLRPLMEQFNGVITQLEQDLMADAKRQTEIIDALNQAIAANIQAIVDEGGKAGEGVNQLGRAIVTSLTLEQKPADKEAKPATSQEIAKQTDQQTQYMVSGLKAISSGIAGSSLAARELKTNTDKLAEAYQALAATNTLLTVAKSVQAQNQLFVDTYSRVADAVTQLPAGWQKVADAYQGAVPVVADLNSPDDVRQLRRTVALNTQSWLLLAGQVDDIKAAYAGNGILPDA

SEQ ID NO: 161 - protein, 372 aa, Aeromonas hydrophila
MTTIATLDLGDQGLLAAYLSATSPALLNQTYANLLLMQQSLANSEIDSTLAVKIEAYQAQMMSQARYYQQTNLSGLIHLLSNGSNFYALVAAFNRLLGQEEDAAVLAGRARLAEQLTSLADQALSYRLNAQALNTRVQVAWGSLRPLMEQFNGVITQLEQDLMADAKRQTEIIDALNQAIAANIQAIVDQGGKAGEGVNQLGRAIVTSLTLEQKPADKEAKPATSQEIAKQTDQQTQYMVSGLKAISSGIAGSSLAARELKTNTDKLAEAYQALAATNTLLTVAKSVQAQNQLFVDTYSRVADAVTQLPAGWQKVADAYQGAVPVVADLNSPDDVRQLRRTLALNTQSWLLLAGQVDDIKAAYAGNGILPDA

SEQ ID NO: 162 - protein, 372 aa, Aeromonas dhakensis
MTTIATLDLGDQGLLAAYLSATSPALLNQTYANLLLMQQSLANSEIDSTLAVKIEAYQAQMMSQARYYQQTNLSGLIHLLSNGSNFYALVAAFNRLLGQEEDAAVLAGRARLAEQLTSLADQALSYRLNAQALNTRVQVAWGSLRPLMEQFNGVITQLEQDLMADAKRQTEIIDALNQAIAANIQAIVDEGGKAGEGVNQLGRAIVTSLTLEQKPADKGAKPATSQEIAKQTDQQTQYMVSGLKAISSGIAGSSLAARELKTNTDKLAEAYQALAATNTLLTVAKSVQAQNQLFVDTYSRVADAVTQLPAGWQKVADAYQGAVPVVADLNSPDDVRQLRRTVALNTQSWLLLAGQVDDIKAAYAGNGILPDA

SEQ ID NO: 163 - protein, 372 aa, Aeromonas hydrophila
MTTIATLDLGDQGLLAAYLSATSPALLNQTYANLLLMQQSLANSEIDSTLAVKIEAYQAQMMSQARYYQQTNLSGLIHLLSNGSNFYALVAAFNRLLGQEEDAAVLAGRARLAEQLTSLADQALSYRLNAQALNTRVQVAWGSLRPLMEQFNGVITQLEQDLMADAKRQTEIIDALNQTIAANIQAIVDEGGKAGEGVNQLGRAIVTSLTLEQKPADKGAKPATSQEIAKQTDQQTQYMVSGLKAISSGIAGSSLAARELKTNTDKLAEAYQALAATNTLLTVAKSVQAQNQLFVDTYSRVADAVTQLPAGWQKVADAYQGAVPVVADLNSPDDVRQLRRTVALNTQSWLLLAGQVDDIKAAYAGNGILPDA

SEQ ID NO: 164 - protein, 372 aa, Aeromonas hydrophila
MTTIATLDLGDQGLLAAYLSATSPALLNQTYANLLLMQQSLANSEIDSTLAVKIEAYQAQMMSQARYYQQTNLSGLIHLLSNGSNFYALVAAFNRLLGQEEDAAVLAGRARLAEQLTSLADQALSYRLNAQALNTRVQVAWGSLRPLMEQFNGVITQLEQDLMADAKRQTEIIDALNQAIAANIQAIVDEGGKAGEGVNQLGRAIVTSLTLEQKPADKEAKPATSQEIAKQTDQQTQYMVSGLKAISSGIAGSSLAARELKTNTDKLAEAYQALAATNTLLSVAKSVQAQNQLFVDTYSRVADAVTQLPAGWQKVADAYQGAVPVVADLNSPDDVRQLRRTVALNTQSWLLLAGQVDDIKAAYAGNGILPDA

SEQ ID NO: 165 - protein, 372 aa, Aeromonas hydrophila
MTTIATLDLGDQGLLAAYLSATSPALLNQTYANLLLMQQSLANSEIDSTLAVKIEAYQAQMMNQARYYQQTNLSGLIHLLSNGSNFYALVAAFNRLLGQEDDAAVLAGGARLGQQLTSLVDQAQSYRLNAQALNTRVQVAWGSLRPLMTQFNGVITQLEQDLMADAKRQTEIIDALNKAIAANIQAIVDEGGKAGEGVNQLGRAIVTSLTLEQKPADKGAKPATSQEIAKETDQQTQYMISGLKALSSGIAGSSQAARELKTNTDKLAQAYQALAVTNTLLTVAKSVQAQNQLFVDTYSRVADTVTQLPAGWQKVADAYQGAVPVVTDLNSPDDVRQLRRTVALNTQSWQLLSSQVDDIKAAYAGNGILPDA

SEQ ID NO: 166 - protein, 372 aa, Aeromonas
MTTIATLDLGDQGLLAAYLSATSPALLNQTYANLLLMQQSLANSEIDSTLAVKIEAYQAQMMSQARYYQQTNLSGLIHLLSNGSNFYALVAAFNRLLGQEDDAAVLAGGARLGQQLTSLVDQAQSYRLNAQALNTRVQVAWGSLRPLMEQFNGVITQLEQDLMADAKRQTEIIDALNQAIAANIQAIVDEGGKAGEGVNQLGRAIVTSLTLEQKPADKEAKPATSQEIAKQTDQQTQYMVSGLKAISSGIAGSSLAARELKTNTDKLAEAYQALAATNTLLTVAKSVQAQNQLFVDTYSRVADAVTQLPAGWQKVADAYQGAVPVVADLNSPDDVRQLRRTLALNTQSWLLLAGQVDDIKAAYAGNGILPDA

SEQ ID NO: 167 - protein, 372 aa, Aeromonas
MTTIATLDLGDQGLLAAYLSATSPALLNQTYANLLLMQQSLANSEIDSTLAVKIEAYQAQMMNQARYYQQINLSGLIHLLSNGSNFYALVAAFNRLLGQEDDAAVLAGGARLGQQLTSLVDQAQSYRLNAQALNTRVQVAWGSLRPLMTQFNGVITQLEQDLMADAKRQTEIIDALNQAIAANIQAIVDEGGKAGEGVNQLGRAIVTSLTLEQKPADKGAKPATSQEIAKETDQQTQYMISGLEALSSGIAGSSQAARELKTNTDKLAQAYQALAATNTLLSVAKSVQAQNQLFVDTYSRVADTVTQLPAGWQKVADAYQGAVPVVTDLNSPDDVRQLRRTVALNTQSWQLLSSQVDDIKAAYAGNGILPDA

SEQ ID NO: 168 - protein, 372 aa, Aeromonas hydrophila
MTTIATLDLGDQGLLAAYLSATSPALLNQTYANLLLMQQSLANSEIDSTLAVKIEAYQAQMMNQARYYQQTNLSGLIHQLSNGSNFYALVAAFNRLLGQEDDAAVLAGGARLGQQLTSLVDQAQSYRLNAQALNTRVQVAWGSLRPLMTQFNGVITQLEQDLMADAKRQTEIIDALNQAIAANIQAIVDEGGKAGEGVNLLGRAIVTSLTLEQKPADKGAKPATSQEIAKETDQQTQYMISGLKALSSGIAGSSQAARELKTNTDKLAQAYQALAATNTLLSVAKSVQAQNQLFVDTYNRVADTVTQLPAGWQKVADAYQGAVPVVTDLNSPDDVRQLRRTVALNTQSWQLLSSQVDDIKAAYAGNGILPDA

SEQ ID NO: 169 - protein, 372 aa, Aeromonas hydrophila
MTTIATLDLGDQGLLAAYLSATSPALLNQTYANLLLMQQSLANSEIDSTLAVKIEAYQAQMMNQARYYQQTNLSGLIHLLSNGSNFYALVAAFNRLLGQEDDAAVLAGGARLGQQLTSLVDQAQSYRLNAQALNTRVQVAWGSLRPLMTQFNGVITQLEQDLMADAKRQTEIIDTLNKAIAANIQAIVDEGGKAGEGVNQLGRAIVTSLTLEQKPADKGAKPATSQEIAKETDQQTQYMISGLKALSSGIAGSSQAARELKTNTDKLAQAYQALAATNTLLSVAKSVQAQNQLFVDTYSRVADTVTQLPAGWQKVAGAYQGAVPVVTDLNSPDDVRQLRRTVALNTQSWQLLSSQVDDIKAAYAGNGILPDA

SEQ ID NO: 170 - protein, 372 aa, Aeromonas hydrophila
MTTIATLDLGDQGLLAAYLSATSPALLNQTYANLLLMQQSLANSEIDSTLAVKIEAYQAQMMNQARYYQQTNLSGLIHLLSNGSNFYALVAAFNRLLGQKDDAAVLAGGARLGQQLTSLVDQAQSYRLNAQALNTRMQVAWSSLRPLMTQFNGVISQLEQDLMADVKRQTEIIDGLNKAIAANIQAIVDEGGKAGEGVNQLGRAIVTSLTLEQKPADKGAKPATSQEIAKETDQQTQYMISGLEALSSGIAGSSQAARELKTNTDKLAQAYQALAATNALLSVAKSVQAQNQLFVDTYSRVADTVTQLPAGWQKVADAYQGAVPVVTDLNSPDDVRQLRRTVALNTQSWQLLSSQVDDIKAAYAGNGILPDA

SEQ ID NO: 171 - protein, 372 aa, Aeromonas hydrophila
MTTIAPLDLGDQGLLAAYLSATSPALLNQTYANLLLMQQSLANSEIDSTLAVKIEAYQAQMMSQARYYQQTNLSGLIHLLSNGSNFYALVAAFNRLLGQEDDAAVLAGGARLGQQLTSLVDQAQSYRLNAQALNTRVQVAWGSLRPLMTQFNGVITQLEQDLMADAKRQTEIIDTLNKAITANIQAIVDEGGKAGEGVNQLGRAIVTSLTLEQKPADKGAKPATSQEIAKETDQQTQYMISGLEALSSGIAGSSQAARELKTNTDKLAQAYQALAATNTLLSVAKSVQAQNQLFVDTYSRVADTVTQLPAGWQKVADAYQGAVPVVTDLNSPDDVRQLRRTVALNTQSWQLLSSQVDDIKAAYAGNGILPDA

SEQ ID NO: 172 - protein, 372 aa, Aeromonas hydrophila
MTTIATLDLGDQGLLAAYLSATSPALLNQTSANLLLMQQSLANSEIDSTLAVKIEAYQAQMMNQARYYQQTNLSGLIHLLSNGSNFYALVAAFNRLLGQEDDAAVLAGGARLGQQLTSLVDQAQSYRLNAQALNTLMQVAWSSLRPLMTQFNGVISQLEQDLMADVKRQTEIIDGLNKAIAANIQAIVDEGGKAGEGVNQLGRAIVTSLTLEQKPADKGAKPATSQEIAKETDQQTQYMISGLEALSSGIAGSSQAARELKTNTDKLAQAYQALAATNALLSVAKSVQAQNQLFVDTYSRVADTVTQLPAGWQKVADAYQGAVPVVTDLNSPDDVRQLRRTVALNTQSWQLLSSQVDDIKAAYAGNGILPDA

SEQ ID NO: 173 - protein, 372 aa, Aeromonas hydrophila
MTTIATLDLGDQGLLAAYLSATSPALLNQTYANLLLMQQSLANSEIDSTLAVKIEAYQAQMMNQARYYQQTNLSGLIHLLSNGSNFYALVAAFNRLLGQEDDAAVLAGGARLGQQLTSLVDQAQSYRLNAQALNTRVQVAWSSLRPLMTQFNGVITQLEQDLMADAKRQTEIIDALNKAIAANIQAIVDEGGKAGEGVNQLGRAIVTSLTLEQKPADKGAKPATSQEIAKETDQQTQYMISGLKALSSGIAGSSQAARELKTNTDKLAQAYQALAATNTLLSVAKSVQAQNQLFVDTYNRVADTVTQLPAGWQKVADAYQGAVPVVTDLNSPDDVRQLRRTVALNTQSWQLLSSQVDDIKAAYAGNGILPDA

SEQ ID NO: 174 - protein, 372 aa, Aeromonas hydrophila
MTTIAPLDLGDQGLLAAYLSATSPALLNQTYANLLLMQQSLANSEIDSTLAVKIEAYQAQMMNQARYYQQTNLSGLIHLLSNGSNFYALVAAFNRLLGQEDDAAVLAGGARLGQQLTSLVDQAQSYRLNAQALNTRVQVAWGSLRPLMTQFNGVITQLEQDLMADAKRQTEIIDALNQAIAANIQAIVDEGGKAGEGVNQLGRAIVTSLTLEQKPADKGAKPATSQEIAKETDQQTQYMISGLKALSSGIAGSSQAARELKTNTDKLAQAYQALAATNTLLSVAKSVQAQNQLFVDTYSRVADTVTQLPAGWQKVADAYQGAVPVVTDLNSPDDVRQLRRTVALNTQSWQLLSSQVDDIKAAYAGNGILPDA

SEQ ID NO: 175 - protein, 372 aa, Aeromonas dhakensis
MTTIATLDLGDQGLLAAYLSATSPALLNQTYANLLLMQQSFANSEIDSTLAVKIEAYQAQMMSQARYYQQTNLSGLIHLLSNGSNFYALVAAFNRLLGQEEDAAVLAGRARQAEQLTSLADQALSYRLNAQALNTRVQVAWGSLRPLMEQFNGVITQLEQDLMADAKRQTEIIDALNQAIAANIQAIVDEGGKAGEGVNQLGRAIVTSLTLEQKPADKEAKTATSQEIAKQTDQQTQYMVSGLKAISSGIAGSSLAARELKTNTDKLAEAYQALAATNTLLTVAKSVQAQNQLFVDTYSRVADAVTQLPAGWQKVADAYQGAVPVVADLNSPDDVRQLRRTVALNTQSWLLLAGQVDDIKAAYAGNGILPDA

SEQ ID NO: 176 - protein, 372 aa, Aeromonas hydrophila
MTTIVTLDLGDQGLLAAYLSATSPALLNQTYANLLLMQQSLANSEIDSTLAVKIEAYQAQMMNQARYYQQTNLSGLIHLLSNGSNFYALVAAFNRLLGQEDDAAVLAGGARLGQQLTSLVDQAQSYRLNAQALNTRVQVAWGSLRPLMTQFNGVITQLEQDLMADAKRQTEIIDTLNKAIAANIQAIVDEGGKAGEGVNQLGRAIVTSLTLEQKPADKGAKPATSQEIAKETDQQTQYMISGLEALSSGIAGSSQAARELKTNTDKLAQAYQALAATNTLLSVAKSVQAQNQLFVDTYSRVADTVTQLPAGWQKVADAYQGAVPVVTDLNSPDDVRQLRRTMALNTQSWQLLSSQVDDIKAAYAGNGILPDA

SEQ ID NO: 177 - protein, 372 aa, Aeromonas hydrophila
MTTIATLDLGDQGLLAAYLSATSPALLNQTYANLLLMQQSLANSEIDSTLAVKIEAYQAQMMNQARYYQQTNLSGLIHLLSNGSNFYALVAAFNRLLGQEDDAAVLAGGARLGQQLTSLVDQAQSYRLNAQALNTRVQVAWSSLRPLMTQFNGVITQLEQDLMADAKRQTEIIDALNQAIAANIQAIVDEGGKAGEGVNQLGRAIVTSLALEQTPADKGAKPATSQEIAKETDQQTQYMISGLKALSSGIAGSSQAARELKTNTDKLAQAYQALAATNTLLTVAKSVQAQNQLFVDTYSRVADTVTQLPAGWQKVADAYQGAVPVVTDLNSPDDVRQLRRTVALNTQSWQLLSSQVDDIKAAYAGNGILPDA

SEQ ID NO: 178 - protein, 372 aa, Aeromonas hydrophila
MTTIATLDLGDQGLLAAYLSATSPALLNQTYANLLLMQQSLANSEIDSTLAVKIEAYQAQMMNQARYYQQTNLSGLIHLLSNGSNFYALVAAFNRLLGQEDDAAVLAGGARLGQQLTSLVDQAQSYRLNAQALNTRVQVAWGSLRPLMTQFNGVITQLEQDLMADAKRQTEIIDALNQAIAANIQAIVDEGGKAGEGVNQLGRAIVTSLTLEQKPADKGAKPTTSQEIAKETDQQTQYMISGLEALSSGIAGSSQAARELKTNTDKLAQAYQALAATNTLLSVAKSVQAQNQLFVDTYNRVADTVTQLPAGWQKVADAYQGAVPVVTDLNSPDDVRQLRRTVALNTQSWQLLSSQVDDIKAAYAGNGILPDA

SEQ ID NO: 179 - protein, 324 aa, Unknown
  Spicies not identified
MTTIATLDLGDQGLLAAYLSATSPALLNQTYANLLLMQQSLANSEIDSTLAVKIEAYQAQMMNQARYYQQTNLSGLIHLLSNGSNFYALVAAFNRLLGQEDDAAVLAGGARLGQQLTSLVDQAQSYRLNAQALNTRVQVAWSSLRPLMTQFNGVITQLEQDLMADAKRQTEIIDALNKAIAANIQAIVDEGGKAGEGVNQLGRAIVTSLTLEQKPADKGAKPATSQEIAKETDQQTQYMISGLEALSSGIAGSSQAARELKTNTDKLAQAYQALAATNTLLSVAKSVQAQNQLFVDTYSRVADTVTQLPAGWQKVADAYQGAVP

SEQ ID NO: 180 - protein, 372 aa, Unknown
  Spicies not identified
MTTIATLDLGDQGLLAAYLSATSPALLNQTYANLLLMQQSLANSEIDSTLAVKIEAYQAQMMNQARYYQQTNLSGLIHLLSNGSNFYALVAAFNRLLGQEDDAAVLAGGARLGQQLTSLVDQAQSYRLNAQALNTRVQVAWGSLRPLMTQFNGVITQLEQDLMADAKRQTEIIDTLNKAIAANIQAIVDEGGKAGEGVNQLGRAIVTSLTLEKNPADKGPKPATSQEIAKETDQQTQYMISGLEALSSGIAGSSQAARELKTNTDKLAQAYQALAATNTLLSVAKSVQAQNQLFVDTYSRVADTVTQLPAGWQKVADAYQGAVPVVTDLNSPDDVRQLRRTVALNTQSWQLLSSQVDDIKAAYAGNGILPDA

SEQ ID NO: 181 - protein, 372 aa, Aeromonas
MTTIATLDLGDQGLLADYLSATSPALLNQTYANLLLMQQSLANSEIDSTLAVKIEAYQAQMMSQARYYQQTNLSGLIHLLSNGSNFYALVAAFNRLLGQEEDAAVLAGRARLAEQLTSLADQALSYRLNAQALNTRVQVAWGSLRPLMEQFNGVITQLEQDLMADAKRQTEIIDALNQAIAANIQAIVDEGGKAGEGVNQLGRAIVTSLTLEQKPADKGAKPTTSQEIAKQTDQQTQYMVSGLKAISSGIAGSSLAARELKTNTDKLAEAYQALAATNTLLTVAKSVQAQNQLFVDTYSRVADAVTQLPAGWQKVADAYQGAVPVVADLNSPDDVRQLRRTLALNTQSWLLLAGQVDDIKAAYAGNGILPDA

SEQ ID NO: 182 - protein, 372 aa, Aeromonas hydrophila
MTTIATLDLGDQGLLAAYLSATSPALLNQTYANLLLMQQSLANSEIDSTLAVKIEAYQAQMMNQARYYQQTNLSGLIHLLSNGSNFYALVAAFNRLLGQEDDAAVLAGGARLGQQLTSLVDQAQSYRLNAQALNTRVQVAWGSLRPLMTQFNGVITQLEQDLMADAKRQTEIIDALNQAIAANIQAIVDEGGKAGEGVNQLGRAIVTSLTLEQKPADKGAKPATSQEIAKETDQQTQYMISGLKALSSGIAGSSQAARELKTNTDKLAQAYQALAATNTLLSVAKSVQAQNQLFVDTYNRVADTVTQLPAGWQKVANAYQGAVPVVTDLNSPDDVRQLRRTVALNTQSWQLLSSQVDDIKAAYAGNGILPDA

SEQ ID NO: 183 - protein, 372 aa, Unknown
  Spicies not identified
MTTIATLDLGDQGLLAAYLSATSPALLNQTYANLLLMQQSLANSEIDSTLAVKIEAYQAQMMNQARYYQQTNLSGLIHLLSNGSNFYALVAAFNRLLGQEDDTAVLAGGARLGQQLTSLVDQAQSYRLNAQALNTRVQVAWGSLRPLMTQFNGVITQLEQDLMADAKRQTEIIDALNQAIAANIQAIVDEGGKAGEGVNQLGRAIVTSLTLEQKPADKGAKPATSQEIAKETDQQTQYMISGLKALSSGIAGSSQAARELKTNTDKLAQAYQALAATNTLLTVAKSVQAQNQLFVDTYNRVADTVTQLPAGWQKVADAYQGAVPVVTDLNSPDDVRQLRRTVALNTQSWQLLSSQVDDIKAAYAGNGILPDA

SEQ ID NO: 184 - protein, 372 aa, Aeromonas hydrophila
MTTIATLDLGDQGLLAAYLSATSPALLNQTYANLLLMQQSLANSEIDSTLAVKIEAYQAQMMNQARYYQQTNLSGLIHLLSNGSNFYALVAAFNRQLGQEDDAAVLAGGARLGQQLTSLVDQAQSYRLNAQALNTRVQVAWGSLRPLMTQFNGVITQLEQDLMADAKRQTEIIDALNQAIAANIQAIVDEGGKAGEGVNQLGRAIVTSLTLEQKPADKGAKPATSQEIAKETDQQTQYMISGLKALSSGIAGSSQAARELKTNTDKLAQAYQALAATNTLLSVAKSVQAQNQLFVDTYNRVADTVTQLPAGWQKVADAYQGAVPVVTDLNSPDDVRQLRRTVALNTQSWQLLSSQVDDIKAAYAGNGILPDA

SEQ ID NO: 185 - protein, 372 aa, Unknown
  Spicies not identified
MTTIATLDLGDQGLLAAYLSATSPALLNQTYANLLLMQQSLANSEIDSTLAVKIEAYQAQMMNQARYYQQTNLSGLIHLLSNGSNFYALVAAFNRLLGQEDDAAVLAGGARLGQQLTSLVDQAQSYRLNAQALNTRVQVAWGSLRPLMTQFNGVITQLEQDLMADAKRQTEIIDALNQAIAANIQAIVDEGGKAGEGVNQLGRAIVTSLTLEQKPADKGAKPATSQEIAKETDQQTQYMISGLKALSSGIAGSSQAARELKTNTDKLAQAYQALAATNTLLSVAKSVQAQNQLFVDTYSRVADTVTQLPAGWQKVADAYQGAVPVVTDLNSPDDVRQLRRTVALNTQSWQLLSSQVDDIKAAYAGNGILPDA

SEQ ID NO: 186 - protein, 372 aa, Unknown
  Spicies not identified
MTTIATLDLGDQGLLAAYLSATSPALLNQTYANLLLMQQSLANSEIDSTLAVKIEAYQAQMMNQARYYQQTNLSGLIHLLSNGSNFYALVAAFNRLLGQEDDAAILAGGARLGQQLTSLVDQAQSYRLNAQALNTRVQVAWGSLRPLMTQFNGVITQLEQDLMADAKRQTEIIDTLNQAIAANIQAIVDEGGKAGEGVNQLGRAIVTSLTLEQKPADKGAKPATSQEIAKETDQQTQYMISGLEALSSGIAGSSQAARELKTNTDKLAQAYQALAATNTLLSVAKSVQAQNQLFVDTYSRVADTVTQLPAGWQKVADAYQGAVPVVTDLNSPDDVRQLRRTVALNTQSWQLLSSQVDDIKAAYAGNGILPDA

SEQ ID NO: 187 - protein, 372 aa, Unknown
  Spicies not identified
MTTIATLDLGDQGLLAAYLSATSPALLNQTYANLLLMQQSLANSEIDSTLAVKIEAYQAQMMNQARYYQQTNLSGLIHLLSNGSNFYALVAAFNRLLGQEDDAAVLAGGARLGQQLTSLVDQAQSYRLNAQALNTRVQVAWGSLRPLMTQFNGVITQLEQDLMADAKRQTEIIDALNKAIAANIQAIVDEGGKAGEGVNQLGRAIVTSLTLEQKPADKGAKPATSQEIAKETDQQTQYMISGLKALSSGIAGSSQAARELKTNTDKLAQAYQALAATNTLLSVAKSVQAQNQLFVDTYNRVADTVTQLPAGWQKVADAYQGAVPVVTDLNSPDDVRQLRRTVALNTQSWQLLSSQVDDIKAAYAGNGILPDA

SEQ ID NO: 188 - protein, 372 aa, Unknown
  Spicies not identified
MTTIATLDLGDQGLLAAYLSATSPALLNQTYANLLLMQQSLANSEIDSTLAVKIEAYQAQMMNQARYYQQTNLSGLIHLLSNGSNFYALVAAFNRLLGQEDDAAVLAGGARLGQQLTSLVDQAQSYQLNAQALNTRVQVAWGSLRPLMTQFNGVITQLEQDLMADAKRQTEIIDALNQAIAANIQAIVDEGGKAGEGVNQLGRAIVTSLTLEQKPADKGAKPATSQEIAKETDQQTQYMISGLEALSSGIAGSSQAARELKTNTDKLAQAYQALAATNTLLSVAKSVQAQNQLFVDTYSRVADTVTQLPAGWQKVADAYQGAVPVVTDLNSPDDVRQLRRTVALNTQSWQLLSSQVDDIKAAYAGNGILPDA

SEQ ID NO: 189 - protein, 372 aa, Unknown
  Spicies not identified
MTTIATLDLGDQGLLTAYLSATSPALLNQTYANLLLMQQSLANSEIDSTLAVKIEAYQAQMMNQARYYQQTNLSGLIHLLSNGSNFYALVAAFNRLLGQEDDAAVLAGGARLGQQLTSLVDQAQSYRLNAQALNTRVQVAWGSLRPLMAQFNGVITQLEQDLMADAKRQTEIIDALNQAIAANIQAIVDEGGKAGEGVNQLGRAIVTSLTLEQKPADKGAKPATSQEIAKETDQQTQYMISGLEALSSGIAGSSQAARELKTNTDKLAQAYQALAATNTLLSVAKSVQAQNQLFVDTYSRVADTVTQLPAGWQKVADAYQGAVPVVTDLNSPDDVRQLRRTVALNTQSWQLLSSQVDDIKAAYAGNGILPDA

SEQ ID NO: 190 - protein, 372 aa, Unknown
  Spicies not identified
MTTIATLDLGDQGLLAAYLSATSPALLNQTYANLLLMQQSLANSEIDSTLAVKIEAYQAQMMNQARYYQQTNLSGLIHLLSNGSNFYALVAAFNRLLGQEDDAAVLAGGARLGQQLTSLVDQAQSYRLNAQALNTRVQVAWGSLRPLMTQFNGVITQLEQDLMADAKRQTEIIDALNQAIAANIQAIVDEGGKAGEGVNQLGRAIVTSLTLEQKPADKGAKPATSQEIAKETDQQTQYMISGLKALSSGIAGSSQAARELKTNTDKLAQAYQALAATNTLLSVAKSVQAQNQLFVDTYSRVADTVTQLPAGWQKVADAYQGAVPVVTDLNSLDDVRQLRRTVALNTQSWQLLSSQVDDIKAAYAGNGILPDA

SEQ ID NO: 191 - protein, 372 aa, Unknown
  Spicies not identified
MTTIATLDLGDQGLLAAYLSATSPALLNQTYANLLLMQQSLANSEIDSTLAVKIEAYQAQMMSQARYYQQTNLSGLIHLLSNGSNFYALIAAFNRLLGQEEDAAVLAGRARLAEQLTSLADQALSYRLNAQALNTRVQVAWGSLRPLMEQFNGVITQLEQDLMADAKRQTEIIDALNQAIAANIQAIVDEGGKAGEGVNQLGRAIVTSLTLEQKPADKGAKPATSQEIAKQTDQQTQYMVSGLKAISSGIAGSSLAARELKTNTDKLAEAYQALAATNTLLTVAKSVQAQNQLFVDTYSRVADAVTQLPAGWQKVADAYQGAVPVVADLNSPDDVRQLRRTVALNTQSWLLLAGQADDIKAAYAGNGILPDA

SEQ ID NO: 192 - protein, 324 aa, Unknown
  Spicies not identified
MTTIATLDLGDQGLLAAYLSATSPALLNQTYANLLLMQQSLANSEIDSTLAVKIEAYQAQMMNQARYYQQTNLSGLIHLLSNGSNFYALVAAFNRLLGQEDDAAVLAGGARLGQQLTSLVDQAQSYRLNAQALNTRVQVAWGSLRPLMTQFNGVITQLEQDLMADAKRQTEIIDALNKAIAANIQAIVDEGGKAGEGVNQLGRAIVTSLTLEQKPADKGAKPATSQEIAKETDQQTQYMISGLKALSSGIAGSSQAARELKTNTDKLAQAYQALAATNTLLSVAKSVQAQNQLFVDTYNRVADTVTQLPAGWQKVADAYQGAVP

SEQ ID NO: 193 - protein, 372 aa, Unknown
  Spicies not identified
MTTIATLDLGDQGLLAAYLSATSPALLNQTYANLLLMQQSLANSEIDSTLAVKIEAYQAQMMNQARYYQQTNLSGLIHLLSNGSNFYALVAAFNRLLGQEDDAAVLAGGARLGQQLTSLVDQAQSYRLNAQALNTRVQVAWGSLRPLMTQFNGVITQLEQDLMADAKRQTEIIDALNQAIAANIQAIVDEGGKAGEGVNQLGRAIVTSLTLEQKPADKGAKPATSQEIAKETDQQTQYMISGLQALSSGIAGSSQAARELKTNTDKLAQAYQALAATNTLLSVAKSVQAQNQLFVDTYNRVADTVTQLPAGWQKVADAYQGAVPVVTDLNSPDDVRQLRRTVALNTQSWQLLSSQVDDIKAAYAGNGILPDA

SEQ ID NO: 194 - protein, 372 aa, Unknown
  Spicies not identified
MTTIATLDLGDQGLLAAYLSATSPALLNQTYANLLLMQQSLANSEIDSTLAVKIEAYQAQMMNQARYYQQTNLSGLIHLLSNGSNFYALVAAFNRLLGQEDDAAVLAGGARLGQQLTSLVDQAQSYRLNAQALNTRVQVAWGSLRPLMTQFNGVITQLEQDLMADAKRQTEIIDALNQAIAANIQAIVDEGGKAGEGVNQLGRAIVTSLTLEQKPADKGAKPATSQEIAKETDQQTQYMISGLKALSSGIAGSSQAARELKTNTDKLAQAYQALAATNTLLSVAKSVQAQNQLFVDTYNRVADTVTQLPAGWQKVADAYQGAVPVVTDLNSPNDVRQLRRTVALNTQSWQLLSSQVDDIKAAYAGNGILPDA

SEQ ID NO: 195 - protein, 372 aa, Unknown
  Spicies not identified
MTTIATLDLGDQGLLAAYLSATSPALLNQTYANLLLMQQSLANSEIDSTLAVKIEAYQAQMMNQARYYQQTNLSGLIHLLSNGSNFYALVAAFNRLLGQEDDAAVLAGGARLGQQLTSLVDQAQSYRLNAQALNTRVQVAWGSLRPLMTQFNGVITQLEQDLMADAKRQTEIIDTLNKAIAANIQAIVDEGGKAGEGVNQLGRAIVTSLTLEQKPADKGAKPATSQEIAKETDQQTQYMISGLKALSSGIAGSSQAARELKTNTDKLAQAYQALAATNTLLSVAKSVQAQNQLFVDTYSRVADTVTQLPAGWQKVADAYQGAVPVVTDLNSPDDVRQLRRTVALNTQSWQLLSSQVDDIKAAYAGNGILPDA

SEQ ID NO: 196 - protein, 372 aa, Unknown
  Spicies not identified
MTTIATLDLGDQGLLAAYLSATSPALLNQTYANLLLMQQSLANSEIDSTLAVKIEAYQAQMMNQARYYQQTNLSGLIHLLSNGSNFYALVAAFNRLLGQEDDAAVLAGGARLGQQLTSLVDQAQSYRLNAQALNTRVQVAWNSLRPLMTQFNGVITQLEQDLMADAKRQTEIIDALNQAIAANIQAIVDEGGKAGEGVNQLGRAIVTSLTLEQKPADKGAKPATSQEIAKETDQQTQYMISGLKALSSGIAGSSQAARDLKTNTDKLAQAYQALAATNTLLSVAKSVQAQNQLFVDTYSRVADTVTQLPAGWQKVADAYQGAVPVVTDLNSPDDVRQLRRTVALNTQSWQLLSSQVDDIKAAYAGNGILPDA

SEQ ID NO: 197 - protein, 372 aa, Aeromonas hydrophila
MTTIATLDLGDQGLLAAYLSATSPALLNQTYANLLLMQQSLANSEIDSTLAVKIEAYQAQMMNQARYYQQTNLSGLIHLLSNGSNFYALVAAFNRLLGQEDDAAVLAGGARLGQQLTSLVDQAQSYRLNAQALNTRVQVAWGSLRPLMTQFNGVITQLEQDLMADAKRQTEIIDALNQAIAANIQAIVDEGGKAGEGVNQLGRAIVTSLTLEQKPADKGAKPATSQEIAKETDQQTQYMISGLKALSSGIAGSSQAARELKTNTDKLAQAYQALAATNTLLTVAKSVQAQNQLFVDTYSRVADTVTQLPAGWQKVADAYQGAVPVVTDLNSPDDVRQLRRTVALNTQSWQLLSSQVDDIKAAYAGNGILPDA

SEQ ID NO: 198 - protein, 372 aa, Aeromonas dhakensis
MTTIATLDLGDQGLLAAYLSATSPALLNQTYANLLLMQQSLANSEIDSTLAVKIEAYQAQMMSQARYYQQTNLSGLIHLLSNGSNFYALVAAFNRLLGQEEDAAVLAGRARLAEQLTSLADQALSYRLNAQALNTRVQVAWGSLRPLMEQFNGVITQLEQDLMADAKRQTEIIDALNQAIAANIQAIVDEGGKAGEGVNQLGRAIVTSLTLEQKPADKEAKPATSQEIAKQTDQQTQYMVSGLKAISSGIAGSSLAARELKTNTDKLAEAYQALAATNTLLTVAKSVQAQNQLFVDTYSRVADAVTQLPAGWQKVADAYQGAVPVVSDLNSPDDVRQLRRTVALNTQSWLLLAGQVDDIKAAYAGNGILPDA

SEQ ID NO: 199 - protein, 372 aa, Aeromonas hydrophila
MTTIATLDLGDQGLLAAYLSATSPALLNQTYANLLLMQQSLANSEIDSTLAVKIEAYQAQMMNQARYYQQTNLSGLIHLLSNGSNFYALVAAFNRLLGQEDDAAVLAGGARLGQQLTSLVDQAQSYRLNAQALNTRVQVAWGSLRPLMTQFNGVITQLEQDLMADAKRQTEIIDALNKAIAANIQAIVDEGGKAGEGVNQLGRAIVTSLTLEQKPADKGAKPATSQEIAKETDQQTQYMISGLKALSSGIAGSSQAARELKTNTDKLAQAYQALAATNTLLTVAKSVQAQNQLFVDTYNRVADTVTQLPAGWQKVADAYQGAVPVVTDLNSPDDVRQLRRTVALNTQSWQLLSSQVDDIKAAYAGNGILPDA

SEQ ID NO: 200 - protein, 372 aa, Aeromonas aquatica
MTTIATLDLGDQGLLAAYLSATSPALLNQTYANLLLMQQSLANSEIDSTLAVKIEAYQAQMMNQARYYQQTNLSGLIHLLSNGSNFYALVAAFNRLLGQEDDAAVLAGGARLGQQLTSLVDQAQSHRLNAQALNTRVQVAWGSLRPLMTQFNGVITQLEQDLMADAKRQTEIIDALNQAIAANIQAIVDEGGKAGEGVNQLGRAIVTSLTLEQKPADKEAKPATSQEIAKETDQQTQYMISGLEALSSGIAGSSQAARELKTNTDKLAQAYQALAATNTLLSVAKSVQAQNQLFVDTYNRVADTVTQLPAGWQKVADAYQGAVPVVTDLNSPADIRQLRRTVALNTQSWQLLSSQVDDIKAAYAGNGILPDA

SEQ ID NO: 201 - protein, 372 aa, Aeromonas
MTTIATLDLGDQGLLAAYLSATSPALLNQTYANLLLMQQSLANSEIDSTLAVKIEAYQAQMMNQARYYQQTNLSGLIHLLSNGSNFYALVAAFNRLLGQEDDAAVLAGGARLGQQLTSLVDQAQSYRLNAQALNTRVQVAWSSLRPLMTQFNGVITQLEQDLMADAKRQTEIIDALNKAIAANIQAIVDEGGKAGEGVNQLGRAIVTSLTLEQKPADKGAKPATSQEIAKETDQQTQYMISGLEALSSGIAGSSQAARELKTNTDKLAQAYQALAATNTLLSVAKSVQAQNQLFVDTYSRVADTVTQLPAGWQKVADAYQGAVPVVTDLNSPDNVRQLRRTLALNTQSWQLLSSQVDDIKAAYAGNGILPDA

SEQ ID NO: 202 - protein, 368 aa, Chromobacterium piscinae
MTQGDASQSIDLGDQDMLVAVLSSSNNALLTESYGNLLRQQQALAGTGIDSGLAIKIAAYQGQMNHQAQYFQQKNLSGLINLITYASNFAALVSAFNNGLSADDQQLYALRQTYAQQLNGLADLAEDYQVGAKATNTQYQVTVDSLNQLMASYDQSMVQLINSLSDEAKQLNKDIDALIQAIAANIQAIVDQGEKAGAGVRELGLAILSSLTLKEEKDKDGKPAASKPGDQVEYMVSGITALTGGIAGSSQAAKDLRSNNDKLATAYQALAQANAMITVAKSVQAQTQLFVEAYRNTQQKIVLLPQSWGQVASAFRKSAFVWQNLTPDDDLARIRRNVSLCNTEWQLLAGQVADIKESYAGNGSLPLA

SEQ ID NO: 203 - protein, 372 aa, Unknown
  Spicies not identified
MLKTITQGDASQSIDLGDQDMLVAVLSSSNNALLTESYGNLLRQQQALAGTGIDSGLAIKIAAYQGQMNHQAQYFQQKNLSGLINLITYASNFAALVSAFNNGLSADDQQLYALRQTYAQQLNGLADLAEDYQVGAKATNTQYQVTVDSLNQLMASYDQSMVQLINSLSDEAKQLNKDIDALIQAIAANIQAIVDQGEKAGAGVRELGLAILSSLTLKEEKDKDGKPAASKPGDQVEYMVSGITALTGGIAGSSQAAKDLRSNNDKLATAYQALAQANAMITVAKSVQAQTQLFVEAYRNTQQKIVLLPQSWGQVASAFRKSAFVWQNLTPDDDLARIRRNVSLCNTEWQLLAGQVADIKESYAGNGSLPLA

SEQ ID NO: 204 - protein, 407 aa, Erwinia mallotivora
MATSVSLNLGDQDLLTDSLALSSSALLQQSYSNLLLTQQAFQAGNMDAGLATKIVAYQRQMYSQASYFKQESLPAIINLMTFGSNFSALVNAFNSILITKSDEDILNGLTQLNRQLESLSDQAQSYGVIAQSLNSQLQVAWSSLSPLLKNYQAQLTQAEQTLSKEAAQWAETIRNLNTQIAANIQGIVSKGNKAGDGVKQLAKGIITSFQVDNNSGKSTENKDNSESKDDTENKSDSTEEKGDQDNKPQTGDNNQSGENKPQNPYNEQSVEYMVSGITAVSSGIAGSGQAAKDLISNTEKLAQAYQALAKTNAMLTVAKSIDAQNQLFVDNYSRVAQTAGKFPQTWNDIASAFQECVSQVNNLKNEDDIWQFKRALAKDALQWKLLSQQIDSIKAVYAGNGSLPDAF

SEQ ID NO: 205 - protein, 361 aa, Serratia liquefaciens
MSIDLSPQELLSLHISISSHALLNQSYSNLLLSQQLLTSLSMDPGLTVKIKAYQNQLRQQAHTFKQSTMSELIGLFTKASNFSTLVTTVDGIFSTEDPQSSQKGGEMVAALATVAQSYQVAAQAVHTQFSATRETLEPLMNNFSETVSAIEQGLGAEAKQQAQTITALNEAIAKNIQGIVDAGIKAGSGVVQLGQAIVAAVPLGTTGNKPKDPPPAKPKSAGDQTEYMISGIQAISAGASGAHQAISDLKANYVKLAAAYQALATANALLSVAKSVHAQAQLFVETYALTAQRVALLPAEWNKVANAYLAATPVIRDISELSDMKQIKQVISLSADQWQQISKVIENAKANYAGNNILPEM

SEQ ID NO: 206 - protein, 361 aa, Serratia plymuthica
MNSSVNINLSPRELLALHLSISSHALLNQSYSNLLLSQQLLTSQLMDPALTVKVKAYQNQLRQQAHAFKQSTMSELIGLFTKASNFSTLVNTINKLYSIEDPRVPQQTAEQIAALADLALSYQNAAQAVDTQFSVTRETLEPLMNNFCETVDAIEQGLSAEAKQQAQTITKLNEAIGKNIQGIVDAGIKAGEGVVQLGQSIVAAVPLEPAKDTPPTQPKTATEQVNYMISGIQAISAGASGAHQAVSDLKANYVKLAAAYQALARANALLSVAKSVHAQAQLFADTYALIAQHVALLPIEWNKVAQDYQATASVIRTVGDMSEMKQIQQVISLSADQWQRLSKVIGNAKSNYAGNNILPEV

SEQ ID NO: 207 - protein, 361 aa, Serratia liquefaciens
MINPVDIDLSPQKLLALHLAISSHALLNQSYSNLLLSQQLLTSQLMDPGLTVKVKAYQNQLRQQAHTFKQTTMSELIGLFSKASNFSTLTNTINSLFSTEDPLSPQKSAEQIAALAEVALSYQVAAQAVDTHFSVTRATLDPLMNNFRGTVETIEQDLSAEAKQLAQTITALNEAIAKNIQGIVDAGVKAGEGVVQLGQSIVATVPLGPAKDTPPAKPKAATEQANYMISGIQAISAGASGAHQAVNDLKANYAKLAAAYHALASANALLTVAKSVQAQAQLFVDTYALTEQRMTLLPAEWNKVAKAYQTAAPMIRNISDASEIKQAKQVISLSAEQWQQLSKVIDNAKLNYAGNNILPEV

SEQ ID NO: 208 - protein, 365 aa, Serratia marcescens
MNNLTDIDLSPQALMAMHISISSYALLNQSYSNLLLSQQLLASQNMDPGLTVKIKAYQNQLRQQAQIFKQSTVAELIGLYTKASDFSALVNAVNTLYSTEDPQVSQKGSEMVSALSEIAQRYQAAAQAVHIQLQTTSEMLTPVMANFREVISAIEQGLNVEAKQQAQTIAELNEAIAKNIQSIAEAGFKAGEGVVQLGQSIVATVPLGPADKKTKEAAAAASKPLGDQASYMISGIQAISSGASGAQQAVNELKANYAKLAVAYRALATANALLSVAKSVHAQAQLFVDTYALTTQRMALLPDEWNKVADAYLTAAPIINQANSALEIKQAKQIISLNAEKWQLFSKSIDNAKANYAGNNILPEV

SEQ ID NO: 209 - protein, 361 aa, Serratia
MNDSVDIDLSPQELLALHIAISSHALLNQSYSNLLLSQQLLTSQLMEPGLTVKVKAYQNQLRQHAHNFKQNTMSELIGLFTKASNFSTLVNTVNTLYSAEDLQAPQKGAEQIAALADLAQSYQIVAKAVDTQFSVTRETLEPLMRNFHETVDAIEQGLSAEAKQQAQTISALNEAIAKNIQGIVDAGIKAGEGVVQLGQSIVATVPLGPAKETPPAKPKAATEQASYMISGIQAISAGTSGAHQAVNDLKANYAKLATAYQTLASANALLTVAKSVQAQAQLFVDAYTLTAQRVAILPTEWNKVATAYQTAASALRNISEAAEIKQIKHVISLSADQWQQLSKVIDKAKTNYAGNNVLPEI

SEQ ID NO: 210 - protein, 364 aa, Serratia ureilytica
MNNLTDIDLSPQALMAMHISISSYALLNQSYSNLLLSQQLLASQNMDPGLTVKIKAYQNQLRQQAQIFKQSTVAELIGLYTKASNFSALVNAVNTLYSTEDPQVSQKGSEMVSALSEIAQRYQAAAQAVHIQLQTTSEMLTPVMANFREVISAIEQGLNVEAKQQAQTIAELNEAIAKNIQSIAEAGFKAGEGVVQLGQSIVATVPLGPADKKTKEAAAAASKPLGDQASYMISGIQAISSGASGAQQAVNELKANYAKLAVAYRALATANALLSVAKSVHAQAQLFVDTYALTTQRMALLPDEWNKVADAYLTAAPIINQANSALEIKQAKQIISLNAEKWQLFSKSIDNAKANYAGNNILPE

SEQ ID NO: 211 - protein, 374 aa, Salinivibrio species
MTGVNTIDTGDAGLLAAYLSAANRGLITQKNANLLLSQQSLAGFELSSDLAVKSSAFQEELRQQANQYLQIVLPAVITTFSNGSNFSALVAAAQRALPNSNSALLAQADQIVHTLSALTTQARLYATHAAGLYAQAGVMNQELSYSNKQYDLVIAQIEQSVSADIKQQTEAIETLNQKIAQNIQGIVDGGTKAGEGVNKIGQTILASIDVTDKKQDQDKEKDKKNEDENKSKIDTQYLIAGLNGISQGASESSQSVRELRTNNEKLGVLYTQLAKNNSLLSVVKSIQAQNNLFVGAFSRTYQALSGLEENWQKVEKQFSSSAEIVATATSEQQVQVIRESLEVGVAQWNLLSDQMDSIKAIYAGIPMVHGITHP

SEQ ID NO: 212 - protein, 365 aa, Serratia marcescens
MNNLTSIDLSPQTLMAMHISISSQALLNQSYSNLLLSQQLLTSQSMDPGLTVKIKAYQNQLRQQAQVFKQNTVAELIGLYTKASNFAALVNAVNALYSTEDPQVSQKGAEMVAALSDVAQHYQAAAQAVHTQLQAKREMLEPLMGNFLNVIDAIEQGLNAEAKQQAQTIAELNEAIAKNIQSIADAGFKAGEGVVQLGQSIVAAVPLGPTDKKPKEAPTAPPKPLSDQASYMISGIQAISAGASGAQQAVNELKANYAKLAVAYRALATANALLSVAKSVQAQAQLFVDTYVLTEQRMALLPTEWGKVAEAYLTAAPIINQAGSAAEIKQAKQIISLNAEKWQLFSKSIDNAKANYAGNNILPEV

SEQ ID NO: 213 - protein, 365 aa, Serratia marcescens
MNNLTDIDLSPQALMAMHISISSYALLNQSYSNLLLSQQLLTSQNMDPGLTVKIKAYQNQLRQQAQIFKQSTVAELIGLYTKASNFSALVNAVNTLYSTEDPQVSQKGSEMVSALSEIAQRYQAAAQAVHIQLQTTSDMLAPVMANFREVISAIEQGLNAEAKQQAQTIAELNEAIAKNIQSIAEAGFKAGEGVVQLGQSIVATVPLGPADKKPKEAAAAAPKPLGDQASYMISGIQAISSGASGAQQAVNELKANYAKLAVAYRALATANALLSVAKSVHAQAQLFVDTYALTTQRMALLPDEWNKVAEAYLAAAPIINQANSALEIKQAKQIISLNAEKWQLFSKSIDNAKANYAGNNILPEV

SEQ ID NO: 214 - protein, 372 aa, Vibrio species
MNTTHITTGELYLGCSDLLTDYLSSSERALLNQKYANLLQYQEDLYSDHLSSDLAVKSAAFQEQLKMQAHVYTNANMSELISDLTLGSSFSALASALRSILREQGTDGFLPNASMIAQEFNTLKGEAESNAIQSKLLFQKLGVMNTEVSDIDARYTEVINDIEQALNQEIKQKVEEITQLNQEISANIQAIIDGGKEVGEGIGKIGVAIIASINVDHTGKPKGESSEDGELESDHSKPSTQYIISGINSIMDGTTETSEAVRQLARNNERLAELYQELAEENSLLSAAKSIQAQNDLFIDQVALTYGAWTNVETHWNNVADQFAAAATIVASASTEQEIQNVIHALELGDIEWNALDDQIDNIKAVYAGITN

SEQ ID NO: 215 - protein, 372 aa, Unknown
  Spicies not identified
MNTTHITTGELYLGCSDLLTDYLSSSERALLNQKYANLLQYQEELYSDHLSSDLAVKSAAFQEQLKMQAHVYTNANMSELISDLTLGSSFSALASALRSILREQGTDGFLPNASMIAQEFNTLKGEAESNAIQSKLLFQKFGVMNTELSDIDARYTEVINDIEQALNQEIKQKVEEITQLNQEISANIQAIIDGGKEVGEGIGKIGVAIIASIKVDHTGKPKGESSEDGELESDHSKPSTQYMISGINSIMDGTTEASEAVRQLARNNERLAELYQELAEENSLLSAAKSIQAQNDLFIDQVALTYGAWTNVETHWNNVADQFAAAATIVASASTEQEILNVIHALELGDIEWNALDDQIDNIKAVYAGITN

SEQ ID NO: 216 - protein, 358 aa, Aeromonas salmonicida
MINATISMDQSMAGQAGQALQIQTYCNSVKQQVSVDFSQFPNLKDNQTQINQGLDVAKGHADLYLNQIQPQIITNISNISNYYALQNAIPTVLPPGSTKAQWLRQLNVIKEQATEYHKVSSDTRLIILDLNNNLITDSRSFQGIVVNLNSKVQGDNGVLAQLNGDIDKVNAAIDGAIAGIVVGGLLVIGGAFVTAIGAVADFVTAGTSTPVVIGGVAMMVAGAAGITAGSIVLHNSLGARQDLYQKRSNLNSEVLIATQIGNGYKGLQVQAQNAVNAATQMSNAWDALTSDLGSLITDLDKGITSGDDIRQLWLTAADTTVKTVLVDVNTIKAQMAGVSPMQVPATATIADFVGRLAA

SEQ ID NO: 217 - protein, 359 aa, Aeromonas hydrophila
MTNATTITMDQGMANQASQAMQIQTYCNSVKQQVPVDFSQFPNLKDNQTQINQGLDLAKGHADLYLNTIQPQIITNISNISNYFALQNAIPAVLPPGSTKAQWLRQLSVIKEQATEYQRLSSDTRLVIVNLNNNLITDSSNFQGIVVNLNSKVQGDNGVLAQLNGDIDKVNAAIDGAIAGIVAGGLLVIGGAFVTAIGAVADFVTAGTSTPVVIGGVAMMVAGAGGITAGAIVLHNSLGARQDLYQKRSSLNSEVLIATQIGNGYKGLQVQAQNAVTAATQMSNAWDSLTSDLGSLITDLDKGITSGDDIRQLWLTAADTTVKTVLTDVTTIKAQMAGVSPLQVPQTDTIANFVARLAA

SEQ ID NO: 218 - protein, 359 aa, Aeromonas hydrophila
MTNATTITMDQGMANQASQALQIQTYCNSVKQQVPVDFSQFPNLKDNQTQINQGLDLAKGHADLYLNTVQPQIITNISNISNYFALQNAIPAVLPPGSTKAQWLRQLSVIKEQATEYQRLSADTRLVIVNLNNNLITDSSNFQGIVVNLNSKVQGDNGVLAQLNGDIDKVNAAIDGAIAGIVAGGLLVIGGAFVTAIGAVADFVTAGTSTPVVIGGVAMMVAGAGGITAGAIVLHNSLGTRQDLYQKRSNLNSEVLIATQIGNGYKGLQVQAQNAVTAATQMSNAWDSLTSDLGSLITDLDKGITSGDDIRQLWLTAADTTVKTVLTDVTTIKAQMAGVSPLQVPQTDTIANFVARLAA

SEQ ID NO: 219 - protein, 359 aa, Aeromonas hydrophila
MTNATTITMDQGMANQASQAMQIQTYCNSVKQQVPVDFSQFPNLKDNQTQINQGLDLAKGHADLYLNTIQPQIITNISNISNYFALQNAIPAVLPPGSTKAQWLRQLSVIKEQATEYQRLSSDTRLVIVNLNNNLITDSSNFQGIVVNLNSKVQGNNGVLAQLNGDIDKVNAAIDGAIAGIVAGGLLVIGGAFVTAIGAVADFVTAGTSTPVVIGGVAMMVAGAGGITAGAIVLHNSLGARQDLYQKRSSLNSEVLIATQIGNGYKGLQVQAQNAVTAATQMSNAWDSLTSDLGSLITDLDKGITSGDDIRQLWLTAADTTVKTVLTDVTTIKAQMAGVSPLQVPQTDTIANFVARLAA

SEQ ID NO: 220 - protein, 359 aa, Aeromonas hydrophila
MTNATTITMDQGMANQASQAMQIQTYCNSVKQQVPVNFSQFPNLKDNQTQINQGLDLAKGHADLYLNTIQPQIITNISNISNYFALQNAIPAVLPPGSTKAQWLRQLSVIKEQATEYQRLSADTRLVIVNLNNNLITDSSNFQGIVVNLNSKVQGDNGVLAQLNGDIDKVNAAIDGAIAGIVAGGLLVIGGAFVTAIGAVADFVTAGTSTPVVIGGVAMMVAGAGGITAGAIVLHNSLGARQDLYQKRSSLNSEVLIATQIGNGYKGLQVQAQNAVTAATQMSNAWDSLTSDLGSLITDLDKGITSGDDIRQLWLTAADTTVKTVLTDVTTIKAQMAGVSPLQVPQTDTIANFVARLAA

SEQ ID NO: 221 - protein, 358 aa, Aeromonas popoffii
MMNATISMDQSMAGQAGQALQIQTYCNSVKQQVPVDFSQFPNLKENQTQINQGLDVAKGHADLYLNQIQPQIITNISNISNYYALQNAIPTVLPPGSTKAQWLRQLNVIKEQATEYHKISSDTRLIILDLNNQLIIDSRNFQGIVVNLNSKVQGDNGVLAQLNGDIDKVNAAIDGAIAGIVVGGLLVIGGAFVTAIGAVADFVTAGTSTPVVIGGVAMMVAGAAGITAGSIVLHNSLGARQDLYQKRSSLNSEVLIATQIGNGYQGLQVQAQNAVSAATQMSNAWDSLTSDLGSLITDLDKGITSGDDIRQLWLTAADTTVKTVLTDVNTIKAQMAGVSPIQVPRTATIADFVGRLAA

SEQ ID NO: 222 - protein, 358 aa, Unknown
  Spicies not identified
MINATISMDQSMAGQAGQALQIQTYCNSVKQQVSVDFSQFPNLKDNQTQINQGLDVAKGHADLYLNQIQPQIITNISNISNYYALQNAIPTVLPPGSTKAQWLRQLNVIKEQATEYHKVSSDTRLIILDLNNNLITDSRNFQGIVVNLNSKVQGDNGVLAQLNGDIDKVNAAIDGAIAGIVIGGLLVIGGAFVTAIGAVADFVTAGTSTPVVIGGVAMMVAGAAGITAGSIVLHNSLGARQDLYQKRSNLNSEVLIATQIGNGYKGLQVQAQNAVNAATQMSNAWDALTSDLGSLITDLDKGITSGDDIRQLWLTAADTTVKTVLVDVNTIKAQMAGVSPMQVPATATIADFVGRLAA

SEQ ID NO: 223 - protein, 358 aa, Unknown
  Spicies not identified
MINATISMDQSMAGQAGQALQIQTYCNSVKQQVSVDFSQFPNLKDNQTQINQGLDVAKGHADLYLNQIQPQIITNISNISNYYALQNAIPTVLPPGSTKAQWLRQLNVIKEQATEYHKVSSDTRLIILDLNNNLITDSRNFQGIVVNLNSKVQGDNGVLAQLNGDIDKINAAIDGAIAGIVVGGLLVIGGAFVTAIGAVADFVTAGTSTPVVIGGVAMMVAGAAGITAGSIVLHNSLGARQDLYQKRSNLNSEVLIATQIGNGYKGLQVQAQNAVNAATQMSNAWDALTSDLGSLITDLDKGITSGDDIRQLWLTAADTTVKTVLVDVNTIKAQMAGVSPMQVPATATIADFVGRLAA

SEQ ID NO: 224 - protein, 358 aa, Unknown
  Spicies not identified
MINATISMDQSMAGQAGQALQIQTYCNSVKQQVSVDFSQFPNLKDNQTQINQGLDVAKGHADLYLNQIQPQIITNISNISNYYALQNAIPTVLPPGSTKAQWLRQLNVIKEQATEYHKVSSDTRLIILDLNNNLITDSRNFQGIVVNLNSKVQGDNGVLAQLNGDIDKVNAAIDGAIAGIVVGGLLVIGGAFVTAIGAVADFVTAGTSTPVVIGGVAMMVAGAAGITAGSIVLHNSLGARQDLYQKRSNLNSEVLIATQIGNGYKGLQVQAQNAVNAATQMSNAWDALTSDLGSLITDLDKGITSGDDIRQLWLTAADTTVKTVLVDVNIIKAQMAGVSPMQVPATATIADFVGRLAA

SEQ ID NO: 225 - protein, 358 aa, Unknown
  Spicies not identified
MINATISMDQSMAGQAGQALQIQTYCNSVKQQVSVDFSQFPNLKDNQTQINQGLDVAKGHADLYLNQIQPQIITNISNISNYYALQNAIPTVLPPGSTKAQWLRQLNVIKEQATEYHKVSSDTRLIILDLNNNLITDSRNFQGIVVNLNSKVQGDNGVLAQLNGDIDKVNAAIDGAIAGIVVGGLLVIGGAFVTAIGAVADFVTAGTSTPVVIGGVAMMVAGAAGITAGSIVLHNSLGARQDLYQKRSNLNSEVLIATQIGNGYKGLQVQAQNAVNAATQMSNAWDALTSDLGSLITDLDKGITSGDDIRQLWLTAADTTVKTVLVDVNTIKAQMAGVSPMQVPANATIADFVGRLAA

SEQ ID NO: 226 - protein, 359 aa, Unknown
  Spicies not identified
MTNATTITMDQGMANQASQALQIQTYCNSVKQQVPVDFSQFPNLKDNQTQINQGLDLAKGHADLYLNTVQPQIITNISNISNYFALQNAIPAVLPPGSTKAQWLRQLSVIKEQATEYQRLSADTRLVIVNLNNNLITDSSNFQGIVVNLNSKVQGDNGVLAQLNGDIDKVNAAIDGAIAGIVAGGLLVIGGAFVTAIGAVADFVTAGTSTPVVIGGVAMMVAGAGGITAGAIVLHNSLGTRQDLYQKRSNLNSEVLIATQIGNGYKGLQVQAQNAVTAATQMSNAWDALTSDLGSLITDLDKGITSGDDIRQLWLTAADTTVKTVLTDVTTIKAQMAGVSPLQVPQTDTIANFVARLAA

SEQ ID NO: 227 - protein, 214 aa, Unknown
  Spicies not identified
VVNLNSKVQGDNGVLAQLNGDIDKVNAAIDGAIAGIVAGGLLVIGGAFVTAIGAVADFVTAGTSTPVVIGGVAMMVAGAGGITAGAIVLHNSLGARQDLYQKRSSLNSEVLIATQIGNGYKGLQVQAQNAVTAATQMSNAWDSLTSDLGSLITDLDKGITSGDDIRQLWLTAADTTVKTVLTDVTTIKAQMAGVSPLQVPQTDTIANFVARLAA

SEQ ID NO: 228 - protein, 358 aa, Aeromonas piscicola
MINATISMDQSMAGQAGQALQIQTYCNSVKQQVSVDFSQFPNLKDNQTQINQGLDVAKGHADLYLNQIQPQIITNISNISNYYALQNAIPTVLPPGSTKAQWLRQLNVIKEQATEYHKVSSDTRLIILDLNNNLITDSRNFQGIVVNLNSKVQGDNGVLAQLNGDIDKINAAIDGAIAGIVVGGLLVIGGAFVTAIGAVADFVTAGTSTPVVIGGVAMMVAGAAGITAGSIVLHNSLGARQDLYQKRSNLNSEVLIATQIGNGYKGLQVQAQNAVNAATQMSNAWDALTSDLGSLITDLDKGITSGDDIRQLWLTAADTTVKTVLIDVNTIKAQMAGVSPMQVPATATIADFVGRLAA

SEQ ID NO: 229 - protein, 359 aa, Aeromonas aquatica
MTNATTITMDQGMANQASQAMQIQTYCNSVKQQVPVDFSQFPNLKDNQTQINQGLDLAKGHADLYLNTIQPQIITNISNISNYFALQNAIPAVLPPGSTKAQWLRQLSVIKEQATEYQRLSSDTRLVIVNLNNNLITDSSNFQGIVVNLNSKVQGDNGVLAQLNGDIDKVNAAIDGAIAGIVAGGLLVIGGAFVTAIGAVADFVTAGTSTPVVIGGVAMMVAGAGGITAGAIVLHNSLGARQDLYQKRSSLNSEVLIATQIGNGYKGLQVQAQNAVTAATQMSNAWDSLTSDLGSLITDLDKGITSGDDIRQLWLTAADTTVKTVLTDVTTIKAQMAGVSPLQVPQTDTIADFVARLAA

SEQ ID NO: 230 - protein, 359 aa, Unknown
  Spicies not identified
MTNATTITMDQGMANQASQAMQIQTYCNSVKQQVPVDFSQFPNLKDNQTQINQGLDLAKGHADLYLNTIQPQIITNISNISNYFALQNAIPAVLPPGSTKAQWLRQLSVIKEQATEYQRLSADTRLVIVNLNNNLITDSSNFQGIVVNLNSKVQGDNGVLAQLNGDIDKVNAAIDGAIAGIVAGGLLVIGGAFVTAIGAVADFVTAGTSTPVVIGGVAMMVAGAGGITAGAIVLHNSLGARQDLYQKRSSLNSEVLIATQIGNGYKGLQVQAQNAVTAATQMSNAWDSLTSDLGSLITDLDKGITSGDDIRQLWLTAADTTVKTVLTDVTTIKAQMAGVSPLQVPQTDTIANFVARLAA

SEQ ID NO: 231 - protein, 359 aa, Unknown
  Spicies not identified
MTNATTITMDQGMANQASQAMQIQTYCNSVKQQVPVNFSQFPNLKDNQTQINQGLDLAKGHADLYLNTIQPQIITNISNISNYFALQNAIPAVLPPGSTKAQWLRQLSVIKEQATEYQRLSSDTRLVIVNLNNNLITDSSNFQGIVVNLNSKVQGDNGVLAQLNGDIDKVNAAIDGAIAGIVAGGLLVIGGAFVTAIGAVADFVTAGTSTPVVIGGVAMMVAGAGGITAGAIVLHNSLGARQDLYQKRSSLNSEVLIATQIGNGYKGLQVQAQNAVTAATQMSNAWDSLTSDLGSLITDLDKGITSGDDIRQLWLTAADTTVKTVLTDVTTIKAQMAGVSPLQVPQTDTIANFVARLAA

SEQ ID NO: 232 - protein, 359 aa, Unknown
  Spicies not identified
MTNATTITMDQGMANQASQAMQIQTYCNSVKQQVPVDFSQFPNLKDNQTQINQGLDLAKGHADLYLNTIQPQIITNISNISNYFALQNAIPAVLPPGSTKAQWLRQLSVIKEQATEYQRLSSDTRLVIVNLNNNLITDSSNFQGIVVNLNSKVQGDNGVLAQLNGDIDKMNAAIDGAIAGIVAGGLLVIGGAFVTAIGAVADFVTAGTSTPVVIGGVAMMVAGAGGITAGAIVLHNSLGARQDLYQKRSSLNNEVLIATQIGNGYKGLQVQAQNAVTAATQMSNAWDSLTSDLGSLITDLDKGITSGDDIRQLWLTAADTTVKTVLTDVTTIKAQMAGVSPLQVPQTDTIANFVARLAA

SEQ ID NO: 233 - protein, 359 aa, Unknown
  Spicies not identified
MTNATTITMDQGMANQASQAMQIQTYCNSVKQQVPVDFSQFPNLKDNQTQINQGLDLAKGHADLYLNTIQPQIITNISNISNYFALQNAIPAVLPPGSTKAQWLRQLSVIKEQATEYQRLSADTRLVIVNLNNNLITDSSNFQGIVVNLNSKVQGDNGVLAQLNGDIDKVNAAIDGAIAGIVAGGLLVIGGAFVTAIGAVADFVTAGTSTPVVIGGVAMMVAGAGGITAGAIVLHNSLGARQDLYQKRSSLKSEVLIATQIGNGYKGLQVQAQNAVTAATQMSNAWDSLTSDLGSLITDLDKGITSGDDIRQLWLTAADTTVKTVLTDVTTIKAQMAGVSPLQVPQTDTIANFVARLAA

SEQ ID NO: 234 - protein, 359 aa, Unknown
  Spicies not identified
MTNATTITMDQGMANQASQAMQIQTYCNSVKQQVPVDFSQFPNLKDNQTQINQGLDLAKGHADLYLNIIQPQIITNISNISNYFALQNAIPAVLPPGSTKAQWLRQLSVIKEQATEYQRLSADTRLVIVNLNNNLITDSSNFQGIVVNLNSKVQGDNGVLAQLNGDIDKVNAAIDGAIAGIVAGGLLVIGGAFVTAIGAVADFVTAGTSTPVVIGGVAMMVAGAGGITAGAIVLHNSLGARQDLYQKRSSLNSEVLIATQIGNGYKGLQVQAQNAVTAATQMSNAWDSLTSDLGSLITDLDKGITSGDDIRQLWLTAADTTVKTVLTDVTTIKAQMAGVSPLQVPQTDTIANFVARLAA

SEQ ID NO: 235 - protein, 359 aa, Unknown
  Spicies not identified
MTNATTITMDQGMANQASQAMQIQTYCNSVKQQVPVDFSQFPNLKDNQTQINQGLDLAKGHADLYLNTIQPQIITNISNISNYFALQNAIPAVLPPGSTKAQWLRQLSVIKEQATEYQRLSSDTRLVIVNLNNNLITDSSNFQGIVVNLNSKVQGDNGVLAQLNGDIDKVNAAIDGAIAGIVAGGLLVIGGAFVTAIGAVADFVTAGTSTPVVIGGVAMMVAGAGGITAGAIVLHNSLGARQDLYQKRSSLKSEVLIATQIGNGYKGLQVQAQNAVTAATQMSNAWDSLTSDLGSLITDLDKGITSGDDIRQLWLTAADTTVKTVLTDVTTIKTQMAGVSPLQVPQTDTIANFVARLAA

SEQ ID NO: 236 - protein, 359 aa, Unknown
  Spicies not identified
MTNATTITMDQGMANQASQAMQIQTYCNSVKQQVPVDFSQFPNLKDNQTQINQGLDLAKGHADLYLNTIQPQIITNISNISNYFALQNAIPAVLPPGSTKAQWLRQLSVIKEQATEYQRLSSDTRLVIVNLNNNLITDSSNFQGIVVNLNSKVQGDNGVLAQLNGDIDKVNAAIDGAIAGIVAGGLLVIGGAFVTAIGAVADFVTAGPSTPVVIGGVAMMVAGAGGITAGAIVLHNSLGARQDLYQKRSSLNSEVLIATQIGNGYKGLQVQAQNAVTAATQMSNAWDSLTSDLGSLITDLDKGITSGDDIRQLWLTAADTTVKTVLTDVTTIKAQMAGVSPLQVPQTDTIANFVARLAA

SEQ ID NO: 237 - protein, 359 aa, Unknown
  Spicies not identified
MTNATTITMDQGMANQASQALQIQTYCNSVKQQVPVDFSQFPNLKDNQTQINQGLDLAKGHADLYLNTVQPQIITNISNISNYFALQNAIPAVLPPGSTKAQWLRQLSVIKEQASEYQRLSADTRLVIVNLNNNLITDSSNFQGIVVNLNSKVQGDNGVLAQLNGDIDKVNAAIDGAIAGIVAGGLLVIGGAFVTAIGAVADFVTAGTSTPVVIGGVAMMVAGAGGITAGAIVLHNSLGTRQDLYQKRSNLNSEVLIATQIGNGYKGLQVQAQNAVTAATQMSNAWDALTSDLGSLITDLDKGITSGDDIRQLWLTAADTTVKTVLTDVTTIKAQMAGVSPLQVPQTDTIANFVARLAA

SEQ ID NO: 238 - protein, 359 aa, Unknown
  Spicies not identified
MTNATTITMDQGMANQASQALQIQTYCNSVKQQVPVDFSQFPNLKDNQTQINQGLDLAKGHADLYLNTVQPQIITNISNISNYFALQNAIPAVLPPGSTKTQWLRQLSVIKEQATEYQRLSADTRLVIVNLNNNLITDSSNFQGIVVNLNSKVQGDNGVLAQLNGDIDKVNAAIDGAIAGIVAGGLLVIGGAFVTAIGAVADFVTAGTSTPVVIGGVAMMVAGAGGITAGAIVLHNSLGTRQDLYQKRSNLNSEVLIATQIGNGYKGLQVQAQNAVTAATQMSNAWDALTSDLGSLITDLDKGITSGDDIRQLWLTAADTTVKTVLTDVTTIKAQMAGVSPLQVPQTDTIANFVARLAA

SEQ ID NO: 239 - protein, 344 aa, Aeromonas hydrophila
MTNATTITMDQGMANQASQAMQIQTYCNSVKQQVPVDFSQFPNLKDNQTQINQGLDLAKGHADLYLNTIQPQIITNISNISNYFALQNAIPAVLPPGSTKAQWLRQLSVIKEQATEYQRLSSDTRLVIVNLNNNLITDSSNFQGIVVNLNSKVQGDNGVLAQLNGDIDKVNAAIDGAFVTAIGAVADFVTAGTSTPVVIGGVAMMVAGAGGITAGAIVLHNSLGARQDLYQKRSSLNSEVLIATQIGNGYKGLQVQAQNAVTAATQMSNAWDSLTSDLGSLITDLDKGITSGDDIRQLWLTAADTTVKTVLTDVTTIKAQMAGVSPLQVPQTDTIANFVARLAA

SEQ ID NO: 240 - protein, 361 aa, Erwinia mallotivora
MTTATDVSMDTSMSGQASQALQIQNYCNSVKQQIPVDFSQFPNLQNFQTEINQGLSTAQDHANGYLNTIQPQIITNISNISNYFALQNAVPATLPPGSTKEQWLSTLSMMKDQATEYQSLSVSTKNVLVVLNNNLVIDSRNFQQIVVDLNTQVNGDNGVLEQLNTEIDGINSAIDGAIAGIVVGGLLVIGGAFVTAIGAVADFVTAGTSTPVVIGGVAMMVAGAAGITAGSIVLHNSLNARQDLYQKRSSLKSEVLTATQIGTGYKGLQNQAQNAVNAATQMANAWDSLTSDLGSLILDLDKGITSGDAIRQLWLTAANTTVKTIITDVSTIKSQMAGVSPMAVPQGTTLANYVNQLAIAA

SEQ ID NO: 241 - protein, 361 aa, Chromobacterium piscinae
MIRENLPVDMGQGMAGQSSQSLQIQTYCNSVKQQVPVDFSQFPNLKDNQEQINAGLATAKGHADQYLTQIQPQIITNIANIGNYYALQNAIPTVLPPGTSKAEWLNTLAALRDQAQSYQALSNSTRLIIIKLNDNLIVDSQAFMSIVANLNTKVQGDNGVLAQLNKEIDQINSAITGAIAGIVAGGLLVIGGAFVTAVGAVADFVTAGTSTPVVIGGVAMMVAGAGGITAGAIVLHNSLNTRQDLYQKQSSLKSEVLTATQIGNGYQGLQVQAQNAVTAATQMSNAWDALTSDLGSLITDIDKGITSPDALRQLWLTAANTTVKTVLTDVNTIKSQMAGITPLPVPKTTTISDYIGALAAA

SEQ ID NO: 242 - protein, 358 aa, Salinivibrio species
MTDTAIGVNQGMAHQSSQALQIQNFCNSVLQQVPVDFSQFPNLKDNETQINHGLDTAKKHANSYLSDIQPQIITNISNISNYYQLHNAIPAVLPKGATKQEWLKQLQALRDQALAYQETSKGTKLIIVDLNNNLITDSKNFQAIVVDLNSKVQGDNGVLSQLDGEIDKINAAIDGAIAGIVAGGLLVIGGAFVTAIGAVADFVTAGTSTPVVIGGVAMMVAGTAGITAGSIVLHNSLNARQDLYQKKSNLKAEVNLASQIGSGYRGLQVQAQNSVNAATQMANAWDALTSDLGTMIADLDKGITSTDSLRELWLTAADGTVKTVLTDVNTIKAQMAGVSELSVPKNTTIADFVGNLAA

SEQ ID NO: 243 - protein, 361 aa, Chromobacterium amazonense
MIRENLPVDMGQGMAGQSSQSLQIQTYCNSVKQQVPVDFSQFPNLKDNQEQINAGLATAKGHADQYLTQIQPQIIANIANIGNYYALQNAIPTVLPPGTSKAEWLNTLAALRDQAQSYQALSNSTRLIIIKLNDNLIVDSQAFMSIVANLNTKVQGDNGVLAQLNKEIDQINSAITGAIAGIVAGGLLVIGGAFVTAVGAVADFVTAGTSTPVVIGGVAMMVAGAGGITAGAIVLHNSLNTRQDLYQKQSSLKSEVLTATQIGNGYQGLQVQAQNAVTAATQMSNAWDALTADLGSLITDIDKGITSPDALRQLWLTAANTTVKTVLTDVNTIKSQMAGITPLPVPKTTTISDYIGALAAA

SEQ ID NO: 244 - protein, 358 aa, Serratia plymuthica
MTIPTIYINDGMNTQSSQALHIQTYCNSVRQQIPVDFERFPNLREIQRQINTGLATAKQHANHYLNDIQPLIIRNVTNIQDYFETQNLISTVMPSGATKEQWLSALSMVSDKAREYQEVSANTRRTIGSLNDKLIIDSNNYQLIVVNLNNVVNGNNGVLEQLNRDIDGINAAIDGAIAGIVVGGLLIIGGAIVTAIGAVAGLVTAGTSTPVVMGGIAMMTAGAGGVIGGAIVLDKSLSAREKLYRDRSQLNSEVLVASQIGSGYQGLQTQAQSAVTAATQMSNAWDSLTSELDILNANLRKGIIDDSFLRQLFLTASQTSVTKVLDGTKIIKQQMAGVVVREVPANQTIADFVKRLAA

SEQ ID NO: 245 - protein, 359 aa, Vibrio campbellii
MLTGTAVAIDQGMVAQNSQALQIQNYCNSVLQQVPVDFGKFPDLHDDQTKINAGLATAKGHANQYLNTIQPEIFDNITNISNYFALYQTIPIMCPEGATKKEWLDALAVLRDEARKYQEVSSNTRLVILGLHDSLVQDSGNFQAVVTNLNSKVGGDNGVLNKLSGEIDSLNAAVSGSIASIVAGGFLIVGGAFVTAIGAVADFVTAGTSTPVVIGGVAMMVAGTAGIAAGAKILKDSLNSRQALYQQRSTLTAEVNIASAISSGFAGLQNQAQNAVTAASQMSNSWDALSSDLDMLSKDISTGIKSPDAVRKMWLMAANTVVKDVITDINITKAQMAGVSPVIVPSNATLADYVNGLAA

SEQ ID NO: 246 - protein, 358 aa, Serratia plymuthica
MTTPTLSINDGMNNQSSQALHIQTYCNSVRQQISVDFERFPNLREHQRQINESLTTAKRHSNHYLNDIQPLIIRNVTNIQDYFETQNLIASVMPSGATKEQWLSTLGMIRDKAKEYQEVSVNTRRTIGTLNDNLIIDSNNYQVIVVNLNNVVGGNNGILEQLNRDIDGINAAIDGAIAGIVVGGLLIIGGAIVTAIGAVAGLVTAGTSTPVVLGGIAMMTAGAGGVVGGAIVLSKSLEAREKLYRDRSQLNSEVMVATQIGSGYKGLQTQAQSAVTAATQMSNAWDSLTSELDTLNANLRKGIIDDGFLRQLFLEASKSSVGKVLDGTKIIKQQMAGVVVREVPQDQTIADFVKRLAA

SEQ ID NO: 247 - protein, 358 aa, Serratia plymuthica
MSTPTISINDGMNTQSSQALHIQTYCNSVRQQVSVDFERFPNLREHQRQINESLTTAKRHSNHYLNDIQPLIIRNVTNIQDYFETQNLISSYIPSGATKEQWLSALGMVHDKAKEYQEVSANTRRTIGTLNDNLIIDSNNYQVIVVNLNNVVGGNNGILEQLNRDIDGINATIDGAITGIVLGGLLIIGGAIVTAIGAVAGLVTAGTSTPVVIGGIAMMTAGAGGVTGGAIVLSNSLSAREKLYRDRSRLNSEVMVATQIGSGYRGLQTQAQSAVTAATQMSNAWDSLTSELETLNTNLRKGIIDDSFLRQLFLEASKSSVGKVLDGTKIIKRQMAGVEIREVPRNQTIAEYVKRLAA

SEQ ID NO: 248 - protein, 359 aa, Vibrio campbellii
MLTGTAVAIDHGMVAQNSQALQIQNYCNSVLQQVPVDFGKFPDLHDDQTKINAGLATAKGHANQYLNTIQPEIFDNITNISNYFALYQTIPIMCPKGATKKEWLDALAVLRDEARKYQEVSSNTRLVILGLHDSLVQDSGNFQAVVTNLNSKVGGDNGVLNKLSGEIDSLNAAVSGSIATIVAGGFLIVGGAFVTAIGAVADFVTAGTSTPVVIGGVAMMVAGTAGIAAGAKILKDSLNSRQALYQQRSTLTAEVHIASAISSGFAGLQNQAQNAVTAASQMSNSWDALSSDLDMLSKDISTGIKSPDAVRKMWLMAANTVVKDVITDINITKAQMAGVSPVIVPSNATLADYVNGLAA

SEQ ID NO: 249 - protein, 358 aa, Unknown
  Spicies not identified
MTIPTIYINDGMNTQSSQALHIQTYCNSVRQQIPVDFERFPNLREIQRQINTGLATAKQHANHYLNDIQPLIIRNITNIQDYFETQNLLSTVMPSGATKEQWLSALSMVSDKAREYQEVSANTRRTIGSLNDKLIIDSNNYQLIVVNLNNVVNGNNGVLEQLNRDIDGINAAIDGAIAGIVVGGLLIIGGAIVTAIGAVAGLVTAGTSTPVVMGGIAMMTAGAGGVIGGAIVLDKSLSAREKLYRDRSQLNSEVLVASQIGSGYQGLQTQAQSAVTAATQMSNAWDSLTSELDILNANLRKGIIDDSFLRQLFLTASQTSVTKVLDGTKIIKQQMAGVVVREVPANQTIADFVKRLAA

SEQ ID NO: 250 - protein, 359 aa, Vibrio species
MLTETTVAIDQGMVAQNSQALQIQNYCNSVLQQVPVDFGKFPDLHDDQTQINAGLVTAKGHANQYLNTIQPEIITNITNISNYYSLYQTIPVVCPEGATKKQWLDALAVLRDEARKYQEVSSNTRLVILGLHDSLVVDSGNFQTVVTNLNNKVGGDNGVLNKLSGEIDSLNAAVSGAIAGIVAGGFLVVGGAFVTAIGAVADLVTAGTSTPVVIGGVAMMVAGGAGIAAGATILKNSLKSRQEIYQQRSTLTAEVNIASAISSGFSGLQNQAQHAVTAASQMSNSWDALSSDLDMLSKDISTGIKSTDAVRKMWLTAANSVVKDVITDINLTKAQMAGVSPITVPNNTTLADYVDGLAA

SEQ ID NO: 251 - protein, 354 aa, Serratia ureilytica
TLYINDGMNTQSSQALHIQTYCNSVRQQIPVDFERFPNLREIQRQINTGLATAKQHANHYLNDIQPLIIRNVTNIQDYFETQNLISTVMPSGATKEQWLSALSMVSDKAREYQEVSANTRRTIGSLNDKLIIDSNNYQLIVVNLNNVVNGNNGVLEQLNRDIDGINAAIDGAIAGIVVGGLLIIGGAIVTAIGAVAGLVTAGTSTPVVMGGIAMMTAGAGGVIGGAIVLDKSLSAREKLYRDRSQLNSEVLVASQIGSGYQGLQTQAQSAVTAATQMSNAWDSLTSELDILNANLRKGIIDDSFLRQLFLTASQTSVTKVLDGTKIIKQQMAGVVVREVPANQTIADFVKRLAA

SEQ ID NO: 252 - protein, 358 aa, Serratia marcescens
MTIPTLYINDGMNTQSSQALHIQTYCNSVRQQIPVDFERFPNLRESQRQINTGLATAKQHANHYLNDIQPLIIRNVTNIQDYFETQNLISTVMPSGATKEQWLSALSMVSDKAREYQEVSANTRRTIGSLNDKLIIDSNNYQLIVVNLNNVVNGNNGVLEQLNRDIDGINAAIDGAIAGIVVGGLLIIGGAIVTAIGAVAGLVTAGTSTPVVMGGIAMMTAGAGGVIGGAIVLDKSLSAREKLYRDRSQLNSEVLVASQIGSGYQGLQTQAQSAVTAATQMSNAWDSLTSELDTLNANLRKGIIDDSFLRQLFLTASQTSVTKVLDGTKIIKQQMAGVVVREVPANQTIADFVKRLAA

SEQ ID NO: 253 - protein, 358 aa, Serratia marcescens
MTIPTLYMNDGMNAQSSQALHIQTYCNSVRQQIPVDFGRFPNLRESERQINTGLGAARQHAEHYLKDIQPLIIRNVTNIQDYFETQNLISTVMPSGATKEQWLSALGMVSDKAKEYQEVSANTRRTIGSLNDKLIIDSNNYQLIVVNLNNVVNGNNGVLEQLNRDIDGINAAIDGAIAGIVVGGLLVIGGAIVTAIGAVAGLVTAGTSTPVVMGGIAMMTAGAGGVIGGAIVLDKSLSAREKLYRDRSQLNSEVLVASQIGSGYRGLQTQAQSAVTAATQMNNAWDSLTSELETLNANLRKGIIDDSFLRQLFLTASQTSVTKVLDGTKIIKQQMAGVVVREVPANQSIADFVKRLAA

SEQ ID NO: 254 - protein, 358 aa, Serratia liquefaciens
MTSSTLSINDGMNAQSSQALHIQTYCNSVRQQIPVDFERFQNLREHQRQINTSLDVAKVHANNYLNNIQPLIISNVTNIQNYFELQKIIPSVIPSGATKEEWLKMLGAINDKAKEYQEVSANTRRTIGTLNDNLIVDSNNYQIIVLNLNNVVGGNNGLLEQLNQDIGRINTAIDGAIAGIVLGGLLVVGGVFVAAVGAVAGLVTAGTSTPVVIGGITMVLAGAAAVTGGAIVLSNSLSAREKLYRDRSQLNSEVMVASQIGSGYQGLQIQAQSAVTAATQMSNAWDSLTTELETLSNNLRTGIIDDGYLRELFLKASTTSVGKVLDGTTIIKRQMAGVDVREVPKGQTIADFTKRLVA

SEQ ID NO: 255 - protein, 358 aa, Serratia
MLTPTLSINDGMNTQSSQALHIQTYCNSVRQQIPVDFERFQNLREHQRQINTSLDTAKIHANNYLNNIQPLIISNVTNIQNYFELQKIIPSVIPSGATKEEWLKMLGAINDKAKEYQEVSASTRRTIGTLNNNLIVDSNNYQVIVLNLNNVVGGNNGLLEQLNQDIGKINAAIDGAIAGIVLGGLLVVGGVFVAAVGAVAGLVTAGTSTPVVLGGITMVLAGAAGVTGGAIVLSNSLNAREKLYRDRSQLNSEVLVASQIGSGYQGLQIQAQSAVTAATQMSNAWDSLTTELETLSNNLRTGIIDDGYLRELFLKASTTSVGKVLDGTTIIKRQMAGVDIRAVPKGQTIADFTKQLVA

SEQ ID NO: 256 - protein, 338 aa, Aquimarina megaterium
MTFSDPTIEAAKTQTTQGLVLQGYCNSILQQPFVDFSEFTNLSKIQTNINDGLQNAKDNAKTYLNGIQNNIISNINSISNFYNLYSAVPTVLPPDATEAQWLSILQAMKSQTDTFIEASDLVIIDLGNLNSNINADVAFFNKTINDLNAIVGGNDGMLASLDKDIERLDKQIAGTIAGTVISGLAIVGGAVMIGVGAIGSPFTAGGSTPLIAGGVAVVLVGTAGTVASALTLKGLYDAKASVLQQKSSLTSEVNLAEGIKSGYSSLGFGASEAVTATSQMKNAWVSINSDLDNLSLNLQNGIISTDSVRQLFLTAANETIPFILEDVSLIKQQMAGVN

SEQ ID NO: 257 - protein, 351 aa, Janthinobacterium species
MSTANKAQCSQALLIQTYANSINEQPSVDFSGDANLLKYQSQINDGLGQAQTHATAYLNVIQPTIIANIANIGNYYALNNAVLTALPTGSTEAQWIATLTALQQQSQQYQTAANGVVSALQTLHDNLTTDSASFSTTVSDLNAAVNGDNGVLSSINSQLGTIQGQIDGAIAGTVLSGLAIVGGTFMVVVGGVADFVTAGTSTPLVVAGVAVVAAGIGGEVASAITLKNLNDEKATLLGQEASLTAEVKLSTGISSGYASLSNQVQAAVQSATQMENAWEFLSSDLGSLISDLQQGIQNTDTIRSLFLTAANTEMQAVTTDITTIKGQMTGVTSIVAPKGQTVGEAAVAAAA

SEQ ID NO: 258 - protein, 366 aa, Tolypothrix species
MSVDLNHGATEIDSANKSQASQGLIIQTYCQSVKSQPAVNFAGYDNLKRYEQDINTGLGQAKAHADTYINVIQPTIITNISNISNYYAMQNAIPVVLPAGATSERWLQILATLEKMATAHKATADATVTALNGLYNNLTEDAGSFTDTVGKLNSAVNGDNGVISSINDQLKDIQSRIDGTIAGVVVSGLAIVGGVFLTAVGGIAEFVTAGTSTPLVVLGVAITLAGVGGAVAAGLALKGLYDSKARLLTDKSRLSDEVGLALGISQGFSGLSNQVQGAVTAALQMSKAWNILSSDLGTVADDIRQGRLSTDDARTLFLTAANSQVQQVTQDISIIKGQMTGVTNLEPMPNRNIKDIIDDLERRVVA

SEQ ID NO: 259 - protein, 362 aa, Photobacterium profundum
MKSSNSSTQKVSKANENQTSQGLIIQNYSNSILEQGEVNFSEDEKLKTYQSQINNSIRLAKAHATRYINVIQPSIIQNISNIGNYYNLHQVIATQLPENATKEEWLEVLGALKQEAINYEKTSRSTVILIQDLHSNLAVDSSSFSTTVDNLNNVLNGDKGVLSTLKNELGSIQGKISGAIAGMAVSGFVIMGGVFIILIGSVADFITAGTSLPIVFGGVAMLVSGVSGEVGSAITFATLNNAKNKLISEEVQLADEVKLSLLMSTAYEEYVTQLHAAMTASTTMANAWQFLISDIEQYENDLSSGIMSPADFLRTMFLGLANEEAKAILKDINNIKKQMTGVRTVVAKPGQTISQLVESEAK

SEQ ID NO: 260 - protein, 361 aa, Janthinobacterium lividum
MSNQNQAAQGISTANKSQCSQALLIQTYANSINEQPSVDFSGDANLLKYQSQINDGLGQAQTHATAYLNVIQPTIIANIANIGNYYALNNAVLTALPTGSTEAQWIATLTALQQQSQQYQTAANGVVSALQTLHDNLTTDSASFSTTVSDLNAAVNGDNGVLSSINSQLGTIQGQIDGAIAGTVLSGLAIVGGTFMVVVGGVADFVTAGTSTPLVVAGVAVVAAGIGGEVASAITLKNLNDEKATLLGQEASLTAEVKLATGISSGYASLSNQVQAAVQSATQMENAWEFLSSDLGSLISDLQQGIQNTDTIRTLFLTAANTEMQAVTTDITTIKGQMTDVTSIVAPKGQTVGEAAVAAAA

SEQ ID NO: 261 - protein, 361 aa, Janthinobacterium species
MSNQNQAAQGISTANKAQCSQALLIQTYANSINEQPSVDFSGDANLLKYQSQINDGLSQAQTHATAYLNVIQPTIIANIANIGNYYALNNAVLTALPTGSTEAQWIATLTALQQQSQQYQTAANGVVSALQTLHDNLTTDSASFATTVSDLNAAVNGDNGVLSSINSQLGTIQGQIDGAIAGTVLSGLAIVGGTFMVVVGGVADFVTAGTSTPLVVAGVAVVAAGIGGEVASAITLKNLNDEKATLLGQEASLTAEVKLATGISGGYASLSNQVQAAVQSATQMENAWEFLSSDLGSLIGDLQQGIQNTDTIRTLFLTAANTEMQAVTTDITTIKGQMTGVTSIVAPKGQTVGEAAVAAAA

SEQ ID NO: 262 - protein, 376 aa, Rhizobium species
MLYASPKNVPLLVALKANNESANQANQQQSSQGLTLLNYCNSVLQQPNVDFGNISKLKTNETEINGYLASARDNASGYIKTIQPQIITNITNISSYYNLYQAVATVMPPGATEKEWLDALIGMKEQTTDYQNQAKQVVSALTNFHTLLGTDAGNFAAATTSLNAIVGGDNGVLADLNGQLDSIQSKIDGAIAGIVLSGIAIVGGAFLAAVGAVAGLVTAGTSTPLVVAGVGIMAAGIGGEVASAIVLSNLNDSKGELLTTKTNLENEVKLTSGISTAIGSLETKAGSAVQAASDMENAWSFLAADLGHLADDLQKGVINTGTLRQIFLTQAQGDVKTILQDTNVIKTQMTGVQNLVAPANTNIGPFLMEIAQKHAA

SEQ ID NO: 263 - protein, 362 aa, Unknown
  Spicies not identified
MTFSDPTIEAAKTQTTQGLVLQGYCNSILQQPFVDFSEFTNLSKIQTNINDGLQNAKDNAKTYLNGIQNNIISNINSISNFYNLYSAVPTVLPPDATEAQWLSILQAMKSQTDTFIEASDLVIIDLGNLNSNINADVAFFNKTINDLNAIVGGNDGMLASLDKDIERLDKQIAGTIAGTVISGLAIVGGAVMIGVGAIGSPFTAGGSTPLIAGGVAVVLVGTAGTVASALTLKGLYDAKASVLQQKSSLTSEVNLAEGIKSGYSSLGFGASEAVTATSQMKNAWVSINSDLDNLSLNLQNGIISTDSVRQLFLTAANETIPFILEDVSLIKQQMAGVHVSISAEDMNVGEYAVHLAEQATAA

SEQ ID NO: 264 - protein, 361 aa, Unknown
  Spicies not identified
MSNQNQAAQGISTANKAQCSQALLIQTYANSINEQPSVDFSGDANLLKYQSQINDGLGQAQTHATAYLNVIQPTIIANIANIGNYYALNNAVLTALPTGSTEAQWIATLTALQQQSQQYQTAANGVVSALQTLHDNLTTDSASFSTTVSDLNAAVNGDNGVLSSINSQLGTIQGQIDGAIAGTVLSGLAIVGGTFMVVVGGVADFVTAGTSTPLVVAGVAVVAAGIGGEVASAITLKNLNDEKATLLGQEASLTAEVKLSTGISSGYASLSNQVQAAVQSATQMENAWEFLSSDLGSLISDLQQGIQNTDTIRSLFLTAANTEMQAVTTDITTIKGQMTGVTSIVAPKGQTVGEAAVAAAA

SEQ ID NO: 265 - protein, 379 aa, Moritella sp
MSNLNVVTSNPSVKKSNPSVAASHIDKANKGQSAQSLIIQTYANSVNEQPSVDFSGNQNLALYEKQINDGLATAQSHAANYLNNIQPNIIKNIANIDNYYTLHNAVPTILPEGSTEEQWVELLTVLKVKATEYQKDANGVKTSLEGLTKDLSHDSQSFSKTVGNLNTAVNGDNGVLASDQKQLDNIQGKIDGAIAGIAVSGLTIAGGVFMIVVGGVADFVTAGTTTPLVIGGIGMVAGGIGGEVAAAITLKNLNDEKARLLREESMLEAEVKLASGISSSYQSLVNQVNNAVTAATQMKNAWESLASDLGSMISDLQLGIISTGIVREMMLTATNGIIQIVLKDIDTIKGQMAGVTIIVAKPGQTVGEAIVEAAEALAA

SEQ ID NO: 266 - protein, 361 aa, Janthinobacterium species
MSNQNQAAQGISTANKSQCSQALLIQTYANSINEQPSVDFSGDANLLKYQSQINDGLSQAQTHATAYLNVIQPTIIANIANIGNYYALNNAVLTALPTGSTEAQWIATLTALQQQSQQYQTAANGVVSALQTLHDNLTTDSASFSTTVSDLNAAVNGDNGVLSSINSQLGTIQGQIDGAIAGTVLSGLAIVGGTFMVVVGGVADFVTAGTSTPLVVAGVAVVAAGIGGEVASAITLKNLNDEKATLLGQEASLTAEVKLATGISSGYASLSNQVQAAVQSATQMENAWEFLSSDLGSLISDLQQGIQNTDTIRTLFLTAANTEMQAVTTDITTIKGQMTGVTSIVAPKGQTVGEAAVAAAA

SEQ ID NO: 267 - protein, 361 aa, Janthinobacterium lividum
MSNQNQAAQGISTANKAQCSQALLIQTYANSINEQPSVDFSGDANLLKYQSQINDGLGQAQTHATAYLNVIQPTIIANIANIGNYYALNNAVLTALPTGSTEAQWIATLTALQQQSQQYQTAANGVVSALQTLHDNLTTDSASFSTTVSDLNAAVNGDNGVLSSINSQLGTIQGQIDGAIAGTVLSGLAIVGGTFMVVVGGVADFVTAGTSTPLVVAGVAVVAAGIGGEVASAITLKNLNDEKATLLGQEASLTAEVKLATGISSGYASLSNQVQAAVQSATQMENAWEFLSSDLGSLISDLQQGIQNTDTIRTLFLTAANTEMQAVTTDITTIKGQMTGVTSIVAPKGQTVGEAAVAAAA

SEQ ID NO: 268 - protein, 361 aa, Providencia stuartii
MRYIMDFNQSPLAINSANKKQSSFDLIVQSSCRSVMQQPLVNFTNNPSLISLQQDVNSALGTAKENAKYYLDTIQPMIIRNISSISAYYTIHNSIASQVPAGKSISDWLNILGAIRDQSNKYASEANVTSTLLSQFSHKLDNSVASFYDVVDRLNTAILGDNGALSQNRNNILNIQTQIAADQAGITISALGIAGGFFSIIVGAVGSLVTGGAAVSMVIGGAVAIATGLAGVIGAVLKLQGDLRLKEKLLIEDANLKNEVRVAQACSTGNAQLATCISQAAQASLEMSNAWQFLSNDIDNLISDLNMGIINTDNVRELFLSSANNQVKIVLKDTDTIKSQMSGVEYVINPKKLTYDLINVN

SEQ ID NO: 269 - protein, 359 aa, Yersinia nurmii
MDLNQTALNINSSNKSQSSQAIIIQGYCNSVLEQPEVDFSYDTSLNDYQQKINTSLGTAQTHASYYLNTIQKQIISNLSNIGNYYALHQAVPESVPENATSQDWITVIQALLTTSQKYESECNNTSSLLSTLSEELSRDTGNFDQIVTELNAALNGNNGVLDSNRKQIASLDTKIAGEEAGIVLSFVGLIGGIISIFIGALADVVTGGAATGMVVGGAITVCTSAAGEGASLAELVGDMKLKATLLSEDANLEAEVKLAHGISSGYLSLANRVSFAVTAAESMSNAWSSLSSDLSTLVSDLDRGIMSADVVRTLFLNVADSAIVTVTQDVDTIKKQMDGISTVTASSGQTVFDILPSYS

SEQ ID NO: 270 - protein, 359 aa, Yersinia kristensenii
MDLNQTALNINNSNKSQSSLAIIIQGYCTSVLEQSNVDFSYDQSLSEYQQKINSSLATAQSHASYYLDTLQKRIISNISNIGNYYALHQEVPKSVPENATAQDWLPVIQALLTISQQYESASSQTSSLLSSLSEELSSDTGNFNQIVTDLNTALNGNNGVLNSNREQIAALDTKIAGEEAGIVLSFVGLIGGIISIFIGAIADVVTGGAAIGMVVGGAITVCTSLAGEGASIAELVGDMKLKATLLAEDADLQAEVKLAHGISSGYQSLASRVGLAVTAAENMANSWSSLSSDLSSLVSDLNNGIMSSDDVRVLFLNAADSEIVTVTQDVDTIKKQMDGINTVTASSGQTIFDILPSYS

SEQ ID NO: 271 - protein, 356 aa, Aquimarina megaterium
MEILRNHIKNIETSQKETTTNGLVLQSYCNSILQQPNLDFSSSEDLAGIQNSINDSIENAKESANSYLSDINPKIISSLSDLKSYFTVYRVVPVTLPEGATIDQWLSVLTVIKGLTENNLRNSEVIVQGLNDLSIRLKADAIAFNELAQKANEMISGDQGELADISDELKSIDRSINAQISAIVGEGIAIAGGAVMIGMGAIASPVGAELIAGGVVTVAAGGALLAASIIELKDLYNQKNDLFQSKATLEQEILLLGGIESVMDSLSDQAKIAAEASEGMTTIWKDVSVNFDRLINDLTNGITSTDEARTFFLNSANNEIADLQDTITTITQQLAGVVTITLPEGETVIDYLEKVS

SEQ ID NO: 272 - protein, 266 aa, Aeromonas salmonicida
MSNGILSQSIANMQQAEAVIQSFTGLPQNAVNIQQNVEEVVAALLPQVQTMQQQVLAFGARLEVQLTQQLANTGPFNPEALKAFVDLVQQEIAPIQTLTAQTLTASQTANDRITQDNIALQRIGVELQATIAGLQSNLAGARQELDSLNKKKLYLLGLGLLGLPGLIALAVTLTQTQNKVNSLEGQVNQIEGQIQRQQGFLGQTTAFSQQFGSLIDRVSKVGNTITLLGGDIANVARDAGQGDPELARLFFTAALTEVRTLQVDAS

SEQ ID NO: 273 - protein, 266 aa, Aeromonas
MSNGILSQSIANMQQAEAVIQSFTGLPQNAVNIQQNVEEVVAALLPQVQTMQQQVLAFGARLEVQLTQQLANTGPFNPEALKAFVDLVQQEIAPIQTLTAQTLTASQTANDRITQDNIALQRIGVELQATIAGLQSNLAGARQELDSLNKKKLYLLGLGLLGLPGLIALAVTLTQTQNKVNSLEGQVNQIEGQIQRQQGFLGQTAAFSQQFGSLIDRVSKVGNTITLLGGDIANVARDAGQGDPELARLFFTAALTEVRTLQVDAS

SEQ ID NO: 274 - protein, 266 aa, Aeromonas
MSNGILSQSIANMQQAEATIQSFSGLPQNAVNIQQNVGEVVAALLPQVQTMQQQVLAFAARLELQLTQQLANTGPFNPDALKAFVDLVQQEIAPIQTLTAQTLTASQTANDRITQDNIALQRIGVELQATIAGLQSNLDGARQELDSLNKKKLYLLGLGLLGLPGLIALAVTLTQTQNKVSSLEGQVNQIEGQIQRQQGFLGQTTAFSQQFGSLIDRVSKVGNTITLLGGDIANVARDAGQGDPELARLFFTAALTEVRTLQVDAS

SEQ ID NO: 275 - protein, 266 aa, Aeromonas
MSNGILSQSIANMQQAEATIQSFSGLPQNAVNIQQNVGEVVAALLPQVQTMQQQVLAFAARLELQLTQQLANTGPFNPDALKAFVDLVEQEIAPIQTLTAQTLTASQTANDRITQDNIALQRIGVELQATIAGLQSNLDGARQELDSLNKKKLYLLGLGLLGLPGLIALAVTLTQTQNKVSSLEGQVNQIEGQIQRQQGFLGQTTAFSQQFGSLIDRVSKVGNTITLLGGDIANVARDAGQGDPELARLFFTAALTEVRTLQVDAS

SEQ ID NO: 276 - protein, 266 aa, Aeromonas salmonicida
MSNGILSQSIANMQQAEAVIQSFTGLPQNAVNIQQNVEEVVAALLPQVQTMQQQVLAFGTRLEAQLVQQLANTGPFNPEALKAFVDLVQQEITPIQTLTAQTLTASQTANERIVQDNIALQRIGVELQATIAGLQSNLAGARQELDSLNKKKLYLLGLGLLGLPGLIALAVTLTQTQNKVNSLEGQVNQIEGQIQRQQGFLGQTTTFSQQFGSLIDRVSKVGNTITLLGGDIANVARDAGQGDPELARLFFTAALTEVRTLQVDAS

SEQ ID NO: 277 - protein, 266 aa, Aeromonas hydrophila
MSNGILSQSIANMQQAEATIQSFSGLPQNAVNIQQNVSEVVAALLPQVQTMQQQVLAFAARLELQLTQQLANTGPFNPEALKAFVDLVQQEIAPIQTLTAQTLTASQSANDRITQDNIALQRIGVELQATIAGLQSNLDGARQELDSLNKKKLYLLGLGLLGLPGLIALAVTLTQTQNKVSSLEGQVNQIEGQIQRQQGFLGQTTAFSQQFGSLIDRVSKVGNTITLLGGDIANVARDAGQGDPELARLFFTAALTEVRTLQVDAS

SEQ ID NO: 278 - protein, 266 aa, Aeromonas hydrophila
MSNGILSQSIANMQQAEATIQSFSGLPQNAVNIQQNVGEVVAALLPQVQTMQQQVLAFAARLELQLTQQLANTGPFNPEALKAFVDLVQQEIAPIQTLTAQTLTASQTANDRITQDNIALQRIGVELQATIAGLQSNLDGARQELDSLNKKKLYLLGLGLLGLPGLIALAVTLTQTQNKVSSLEGQVNQIEGQIQRQQGFLGQTTAFSQQFGSLIDRVSKVGNTITLLGGDIANVARDAGQGDPELARLFFTAALTEVRTLQVDAS

SEQ ID NO: 279 - protein, 266 aa, Aeromonas hydrophila
MSNGILSQSIANMQQAEATIQSFSGLPQNAVNIQQNVGEVVAALLPQVQTMQQQVLAFAARLELQLTQQLANTGPFNPEALKAFVDLVQQEIAPIQTLTAQTLTASQSANDRITQDNIALQRIGVELQATIAGLQSNLDGARQELDSLNKKKLYLLGLGLLGLPGLIALAVTLTQTQNKVSSLEGQVNQIEGQIQRQQGFLGQTTAFSQQFGSLIDRVSKVGNTITLLGGDIANVARDAGQGDPELARLFFTAALTEVRTLQVDAS

SEQ ID NO: 280 - protein, 266 aa, Aeromonas hydrophila
MSNGILSQSIANMQQAEATIQSFSGLPQNAVNIQQNVGEVVAALLPQVQTMQQQVLAFAARLELQLTQQLANTGPFNPEALKAFVDLVQQEIAPIQTLTAQTLTASQSANDRITQDNIALQRIGVELQATIAGLQSNLDGARQELDSLNKKKLYLLGLGLLGLPGLIALAVTLTQTQNKVSSLEGQVNQIEGQIQRQQGFLGQTTAFSQQFGSLIDRVSKVGNTISLLGGDIANVARDAGQGDPELARLFFTAALTEVRTLQVDAS

SEQ ID NO: 281 - protein, 266 aa, Aeromonas hydrophila
MSNGILSQSIANMQQAEATIQSFSGLPQNAVNIQQNVGEVVAALLPQVQTMQQQVLAFAARLELQLTQQLANTGPFNPEALKAFVDLVQQEIAPIQILTAQTLTASQTANDRITQDNIALQRIGVELQATIAGLQSNLDGARQELDSLNKKKLYLLGLGLLGLPGLIALAVTLTQTQNKVSSLEGQVNQIEGQIQRQQGFLGQTTAFSQQFGSLIDRVSKVGNTITLLGGDIANVARDAGQGDPELARLFFTAALTEVRTLQVDAS

SEQ ID NO: 282 - protein, 266 aa, Aeromonas
MSNGILSQSIANMQQAEATIQSFTGLPQNAVNIQQNVGEVVAALLPQVQTMQQQVLAFAARLETQLTQQLANSGPFNPDALKAFVDQVQQEIAPIQTLTAQTLTASQAANDRITQDNIALQRIGVELQATIAGLQSNLAGARQELDSLNKKKLYLLGLGLLGLPGLIALAVTLTQTQNKVSSLEGQVNQIEGQIQRQQGFLGQTTAFSQQFGSLIDRVSKVGNTITLLGGDIANVARDAGQGDPELARLFFTAALTEVRTLQVDAS

SEQ ID NO: 283 - protein, 266 aa, Aeromonas hydrophila
MSNGILSQSIANMQQAEATIQSFSGLPQNAVNIQQNVGEVVAALLPQVQTMQQQVLAFAARLELQLTQQLANTGPFNPDALKAFVDLVQQEIAPIQTLTAQTLTASQTANDRITQDNIALQRIGVELQATIAGLQSNLDGARQELDSLNKKKLYLLGLGLLGLPGLIALAATLTQTQNKVSSLEGQVNQIEGQIQRQQGFLGQTTAFSQQFGSLIDRVSKVGNTITLLGGDIANVARDAGQGDPELARLFFTAALTEVRTLQVDAS

SEQ ID NO: 284 - protein, 266 aa, Aeromonas hydrophila
MSNGILSQSIANMQQAEATIQSFSGLPQNAVNIQQNVGEVVAALLPQVQTMQQQVLAFAARLELQLTQQLANTGPFNPEALKAFVDLVEQEIAPIQTLTAQTLTASQTANDRITQDNIALQRIGVELQATIAGLQSNLDGARQELDSLNKKKLYLLGLGLLGLPGLIALAVTLTQTQNKVSSLEEQVNQIEGQIQRQQGFLGQTTAFSQQFGSLIDRVSKVGNTITLLGGDIANVARDAGQGDPELARLFFTAALTEVRTLQVDAS

SEQ ID NO: 285 - protein, 266 aa, Aeromonas
MSNGILSQSIANMQQAEATIQSFSGLPQNAVNIQQNVGEVVAALLPQVQTMQQQVLAFAARLELQLTQQLANTGPFNPDALKAFVDLVEQEIAPIQTLTAQTLTASQTVNDRITQDNIALQRIGVELQATIAGLQSNLDGARQELDSLNKRKLYLLGLGLLGLPGLIALAVTLTQTQNKVSSLEGQVNQIEGQIQRQQGFLGQTTAFSQQFGSLIDRVSKVGNTITLLGGDIANVARDAGQGDPELARLFFTAALTEVRTLQVDAS

SEQ ID NO: 286 - protein, 266 aa, Aeromonas
MSNGILSQSIANMQQAEATIQSFTGLPQNAVNIQQNVGEVVAALLPQVQTMQQQVLAFAGRLETQLTQQLANTGPFNPDALKAFVDQVQQEIIPIQTLTAQTLTASQAANDRITHDNIALQRIGVELQATIAGLQSNLAGARQELDSLNKKKLYLLGLGLLGLPGLIALAVTLTQTQNKVSSLEGQVNQIEGQIQRQQGFLGQTTAFSQQFGSLIDRVSKVGNTITLLGGDIANVARDAGQGDPELARLFFTAALTEVRTLQVDAS

SEQ ID NO: 287 - protein, 266 aa, Aeromonas hydrophila
MSNGILSQSIANMQQAEATIQSFSGLPQNAVNIQQNVGEVVAALLPQVQTMQQQVLAFAGRLETQLTQQLANTGPFNPDALKAFVDQVQQEIAPIQTLTAQTLTASQAANDRITQDNIALQRIGVELQATIAGLQSNLAGARQELDSLNKKKLYLLGLGLLGLPGLIALAVTLTQTQNKVSSLEGQVNQIEGQIQRQQGFLGQTTAFSQQFGSLIDRVSKVGNTITLLGGDIANVARDAGQGDPELARLFFTAALTEVRTLQVDAS

SEQ ID NO: 288 - protein, 266 aa, Aeromonas hydrophila
MSNGILSQSIANMQQAEATIQSFTGLPQNAVNIQQNVGEVVAALLPQVQTMQQQVLAFAGRLETQLTQQLANTGPFNPDALKAFVDQVQQEITPIQTLTAQTLTASQAANDRITQDNIALQRIGVELQATIAGLQSNLAGARQELDSLNKKKLYLLGLGLLGLPGLIALAVTLTQTQNKVSSLEGQVNQIEGQIQRQQGFLGQTTAFSQQFGSLIDRVSKVGNTITLLGGDIANVARDAGQGDPELARLFFTAALTEVRTLQVDAS

SEQ ID NO: 289 - protein, 266 aa, Aeromonas hydrophila
MSNGILSQSIANMQQAEATIQSFSGLPQNAVNIQQNVGEVVAALLPQVQTMQQQVLAFAGRLETQLTQQLANSGPFNPDALKAFVDQVQQEIAPIQTLTAQTLTASQAANDRITQDNIALQRIGVELQATIAGLQSNLAGARQELDSLNKKKLYLLGLGLLGLPGLIALAVTLTQTQNKVSSLEGQVNQIEGQIQRQQGFLGQTTAFSQQFGSLIDRVSKVGNTITLLGGDIANVARDAGQGDPELARLFFTAALTEVRTLQVDAS

SEQ ID NO: 290 - protein, 266 aa, Aeromonas hydrophila
MSNGILSQSIANMQQAEATIQSFTGLPQNAVNIQQNVGEVVAALLPQVQTMQQQVLAFAGRLETQLTQQLANSGPFNPDALKAFVDQVQQEITPIQTLTAQTLTASQAANDRITQDNIALQRIGVELQATIAGLQSNLAGARQELDSLNKKKLYLLGLGLLGLPGLIALAVTLTQTQNKVSSLEGQVNQIEGQIQRQQGFLGQTTAFSQQFGSLIDRVSKVGNTITLLGGDIANVARDAGQGDPELARLFFTAALTEVRTLQVDAS

SEQ ID NO: 291 - protein, 266 aa, Aeromonas
MSNGILSQSIANMQQAEATIQSFTGLPQNAVNIQQNVGEVVAALLPQVQTMQQQVLAFAGRLETQLTQQLANTGPFNPDALKAFVDQVQQEITPIQTLTAQTLTASQAANDRITQDNIALQRIGVELQATIAGLQSNLAGARQELDSLNKKKLYLLGLGLLGLPGLIALAVTLTQTQNKVSSLEGQVNQIEGQIQRQQGFLGQTTTFSQQFGSLIDRVSKVGNTITLLGGDIANVARDAGQGDPELARLFFTAALTEVRTLQVDAS

SEQ ID NO: 292 - protein, 266 aa, Aeromonas hydrophila
MSNGILSQSIANMQQAEATIQSFTGLPQNAVNIQQNVGEVVAALLPQVQTMQQQVLAFAGRLETQLTQQLANTGPFNPDALKAFVDQAQQEITPIQTLTAQTLTASQAANDRITQDNIALQRIGVELQATIAGLQSNLAGARQELDSLNKKKLYLLGLGLLGLPGLIALAVTLTQTQNKVSSLEGQVNQIEGQIQRQQGFLGQTTAFSQQFGSLIDRVSKVGNTITLLGGDIANVARDAGQGDPELARLFFTAALTEVRTLQVDAS

SEQ ID NO: 293 - protein, 266 aa, Aeromonas dhakensis
MSNGILSQSIANMQQAEATIQSFSGLPQNAVNIQQNVGEVVAALLPQVQTMQQQVLAFAGRLETQLTQQLANTGPFNPDALKAFVDQVQQEIAPIQTLTAQTLTASQAANDRITQDNIALQRIGVELQATIAGLQSNLAGARQELDSLNKKKLYLLGLGLLGLPGLIALAVTLTQTQNKVSSQEGQVNQIEGQIQRQQGFLGQTTAFSQQFGSLIDRVSKVGNTITLLGGDIANVARDAGQGDPELARLFFIAALTEVRTLQVDAS

SEQ ID NO: 294 - protein, 266 aa, Aeromonas hydrophila
MSNGILSQSIANMQQAEATIQSFTGLPQNAVNIQQNVGEVVAALLPQVQTMQQQVLAFAGRLETQLTQQLANSGPFNPDTLKAFVDQVQQEIIPIQTLTAQTLTAGQAANDRITQDNIALQRIGVELQATIAGLQSNLAGARQELDSLNKKKLYLLGLGLLGLPGLIALAVTLTQTQNKVSSLEGQVNQIEGQIQRQQGFLGQTTAFSQQFGSLIDRVSKVGNTITLLGGDIANVARDAGQGDPELARLFFTAALTEVRTLQVDAS

SEQ ID NO: 295 - protein, 266 aa, Aeromonas hydrophila
MSNGILSQSIANMQQAEATIQSFSGLPQNAVNIQQSVGEVVAALLPQVQTMQQQVLAFAARLELQLTPQLANTGPFNPEALKAFVDLVQQEIAPIQTLTAQTLTASQTANDRITQDNIALQRIGVELQATIAGLQSNLDGARQELDSLNKKKLYLLGLGLLGLPGLIALAVTLTQTQNKVSSLEGQVNQIEGQIQRQQGFLGQTTAFSQQFGSLIDRVSKVGNTITLLGGDIANVARDAGQGDPELARLFFTAALTEVRTLQVDAS

SEQ ID NO: 296 - protein, 266 aa, Aeromonas piscicola
MSNGILSQSIANMQQAEAVIQSFTGLPQNAVNIQQNVEEVVAALLPQVQTMQQQVLAFGARLEVQLTQQLANTGPFNPEALKAFVDLVQQEITPIQTLTAQTLTASQTANERIVQDNIALQRIGVELQATIAGLQSNLAGARQELDSLNKKKLYLLGLGLLGLPGLIALAVTLTQTQNKVNSLEGQVNQIEGQSQRQQGFLGQTTTFSQQFGSLIDRVSKVGNTITLLGGDIANVARDAGQGDPELARLFFTAALTEVRTLQVDAS

SEQ ID NO: 297 - protein, 266 aa, Aeromonas bestiarum
MSNGILSQSIANMQQAEAVIQSFTGLPQNAVNIQQNVEEVVAALLPQVQTMQQQVLAFGARLEVQLTQQLANTGPFNPEALKAFVDLVQQEITPIQTLTAQTLTASQTANDRITQDNIALQRIGVELQATIAGLQSNLAGARQELDSLNKKKLYLLGLGLLGLPGLIALAVTLTQTQNKVNSLEGQVNQIEGQIQRQQGFLGQTTAFSQQFGSLIDRVSKVGNTITLLGGDIANVARDAGQGDPELARLFFTAALTEVRTLQVDAS

SEQ ID NO: 298 - protein, 266 aa, Aeromonas hydrophila
MSNGILSQSIANMQQAEATIQSFSGLPQNAVNIQQNVGEVVAALLPQVQTMQQQVLAFAAHLELQLTQQLANTCPFNPDALKAFVDLVQQEITPIQTLTAQTLIASQSANDRITQDNIALQRIGVELQATIAGLQSNLDGARQELDSLNKKKLYLLGLGLLGLPGLIALAVTLTQTQNKVSSLEGQVNQIEGQIQRQQGFLGQTTAFSQQFGSLIDRVSKVGNTITLLGGDIANVARDAGQGDPELARLFFTAALTEVRTLQVDAS

SEQ ID NO: 299 - protein, 266 aa, Haemophilus piscium
MSNGILSQSIANMQQAEVVIQSFTGLPQNAVNIQQNVEEVVAALLPQVQTMQQQVLAFGARLEVQLTQQLANTGPFNPEALKAFVDLVQQEIAPIQTLTTQTLTASQTANDRITQDNIALQRIGVELQATIAGLQSNLAGARQELDSLNKKKLYLLGLGLLGLPGLIALAVTLTQTQNKVNSLEGQVNQIEGQIQRQQGFLGQTAAFSQQFGSLIDRVSKVGNTITLLGGDIANVARDAGQGDPELARLFFTAALTEVSTLQVDAS

SEQ ID NO: 300 - protein, 266 aa, Unknown
  Spicies not identified
MSNGILSQSIANMQQAEAVIQSFTGLPQNAVNIQQNVEEVVAALLPQVQTMQQQVLAFGARLEMQLTQQLANTGPFNPEALKAFVDLVQQEIAPIQTLTAQTLTASQTANDRITQDNIALQRIGVELQATIAGLQSNLAGARQELDSLNKKKLYLLGLGLLGLPGLIALAVTLTQTQNKVNSLEGQVNQIEGQIQRQQGFLGQTTAFSQQFGSLIDRVSKVGNTITLLGGDIANVARDAGQGDPELARLFFTAALTEVRTLQVDAS

SEQ ID NO: 301 - protein, 266 aa, Unknown
  Spicies not identified
MSNGILSQSIANMQQAEAVIQSFTGLPQNAVNIQQNVEEVVAALLPQVQTMQQQVLAFGARLEVQLTQQLANTGPFNPEALKAFVDLVQQEIAPIQTLTAQTLTASQTANDRITQDNIALQRIGVELQATIAGLQSNLAGARQELDSLNKKKLYLLGLGLLGLPGLIALAVTLTQTQNKVNSLEGQMNQIEGQIQRQQGFLGQTTAFSQQFGSLIDRVSKVGNTITLLGGDIANVARDAGQGDPELARLFFTAALTEVRTLQVDAS

SEQ ID NO: 302 - protein, 266 aa, Unknown
  Spicies not identified
MSNGILSQSIANMQQAEATIQSFSGLPQNAVNIQQNVGEVVAALLPQVQTMQQQVLAFAARLELQLTQQLANTGPFNPDALKAFVDLVQQEIAPIQTLTAQTLTASQTANDRITQDNIALQRIGVELQATIAGLQSNLDGARQELDSLNKRKLYLLGLGLLGLPGLIALAVTLTQTQNKVSSLEGQVNQIEGQIQRQQGFLGQTTAFSQQFGSLIDRVSKVGNTITLLGGDIANVARDAGQGDPELARLFFTAALTEVRTLQVDAS

SEQ ID NO: 303 - protein, 266 aa, Unknown
  Spicies not identified
MSNGILSQSIANMQQAEATIQSFSGLPQNAVNIQQNVGEVVAALLPQVQTMQQQVLAFAARLELQLTQQLANTGPFNPDALKAFVDLVQQEIAPIQTLTAQTLTASQTANDRITQDNIALQRIGVELQATIAGLQSNLDGARQELDSLNKKKLYLLGLGLLGLPGLIALAVTLTQTQNKVSSLEGQVNQIEGQIQRQQGFLGQTTAFSQQFGSLIDRVSKVGNTINLLGGDIANVARDAGQGDPELARLFFTAALTEVRTLQVDAS

SEQ ID NO: 304 - protein, 266 aa, Unknown
  Spicies not identified
MSNGILSQSIANMQQAEATIQSFSGLPQNAVNIQQNVGEVVAALLPQVQTMQQQVLAFAARLEQQLTQQLANTGPFNPDALKAFVDLVQQEIAPIQTLTAQTLTASQTANDRITQDNIALQRIGVELQATIAGLQSNLGGARQELDSLNKKKLYLLGLGLLGLPGLIALAVTLTQTQNKVSSLEGQVNQIEGQIQRQQGFLGQTTAFSQQFGSLIDRVSKVGNTITLLGGDIANVARDAGQGDPELARLFFTAALTEVRTLQVDAS

SEQ ID NO: 305 - protein, 266 aa, Unknown
  Spicies not identified
MSNGILSQSIANMQQAEATIQSFSGLPQNAVNIQQNVGEVVAALLPQVQTMQQQVLAFAARLEQQLTQQLANTGPFNPDALKAFVDLVQQEIAPIQTLTAQTLTASQSANDRITQDNIALQRIGVELQATIAGLQSNLDGARQELDSLNKKKLYLLGLGLLGLPGLIALAVTLTQTQNKVSSLEGQVNQIEGQIQRQQGFLGQTTAFSQQFGSLIDRVSKVGNTITLLGGDIANVARDAGQGDPELARLFFTAALTEVRTLQVDAS

SEQ ID NO: 306 - protein, 266 aa, Unknown
  Spicies not identified
MSNGILSQSIANMQQAEATIQSFSGLPQNAVNIQQNVGEVVAALLPQVQTMQQQVLAFAARLELQLTQQLANTGPFNPDALKAFVDLVQQEIAPIQTLTAQTLTASQSANDRITQDNIALQRIGVELQATIAGLQSNLDGARQELDSLNKKKLYLLGLGLLGLPGLIALAVTLTQTQNKVSSLEGQVNQIEGQIQRQQGFLGQTTAFSQQFGSLIDRVSKVGNTITLLGGDIANVARDAGQGDPELARLFFTAALTEVRTLQVDAS

SEQ ID NO: 307 - protein, 266 aa, Unknown
  Spicies not identified
MSNGILSQSIANMQQAEATIQSFSGLPQNAVNIQQNVSEVVAALLPQVQTMQQQVLAFAARLELQLTQQLANTGPFNPEALKAFVDLVQQEIAPIQTLTAQTLTASQSANDRITQDNIALQRIGVELQATIAGLQSNLDGARQELDSLNKKKLYLLGLGLLGLPGLIALAVTLTQTQNKVSSLEGQVNQIEGQIQRQQGFLGQTTAFSQQFGSLIDRVSKVGNTTTLLGGDIANVARDAGQGDPELARLFFTAALTEVRTLQVDAS

SEQ ID NO: 308 - protein, 266 aa, Unknown
  Spicies not identified
MSNGILSQSIANMQQAEATIQSFSGLPQNAVNIQQNVGEVVAALLPQVQTMQQQVLAFAARLELQLTQQLANTGPFNPEALKAFVDLVQQEIAPIQTLTAQTLTASQTANDRITQDNIALQRIGVELQATIAGLQSNLDGARQELDALNKKKLYLLGLGLLGLPGLIALAVTLTQTQNKVSSLEGQVNQIEGQIQRQQGFLGQTTAFSQQFGSLIDRVSKVGNTITLLGGDIANVARDAGQGDPELARLFFTAALTEVRTLQVDAS

SEQ ID NO: 309 - protein, 266 aa, Unknown
  Spicies not identified
MSNGILSQSIANMQQAEATIQSFSGLPQNAVNIQQNVGEVVAALLPQVQTMQQQVLAFAARLEQQLTQQLANTGPFNPEALKAFVDLVQQEIAPIQTLTAQTLTASQTANDRITQDNIALQRIGVELQATIAGLQSNLDGARQELDSLNKKKLYLLGLGLLGLPGLIALAVTLTQTQNKVSSLEGQVNQIEGQIQRQQGFLGQTTAFSQQFGSLIDRVSKVGNTITLLGGDIANVARDAGQGDPELARLFFTAALTEVRTLQVDAS

SEQ ID NO: 310 - protein, 266 aa, Unknown
  Spicies not identified
MSNGILSQSIANMQQAEATIQSFTGLPQNAVNIQQNVGEVVAALLPQVQTMQQQVLAFAARLELQLTQQLANTGPFNPEALKAFVDLVQQEIAPIQTLTAQTLTASQSANDRITQDNIALQRIGVELQATIAGLQSNLDGARQELDSLNKKKLYLLGLGLLGLPGLIALAVTLTQTQNKVSSLEGQVNQIEGQIQRQQGFLGQTTAFSQQFGSLIDRVSKVGNTITLLGGDIANVARDAGQGDPELARLFFTAALTEVRTLQVDAS

SEQ ID NO: 311 - protein, 266 aa, Unknown
  Spicies not identified
MSNGILSQSIANMQQAEATIQSFSGLPQNAVNIQQNVGEVVAALLPQVQTMQQQVLAFAARLELQLTQQLANTGPFNPEALKTFVDLVQQEIAPIQTLTAQTLTASQSANDRITQDNIALQRIGVELQATIAGLQSNLDGARQELDSLNKKKLYLLGLGLLGLPGLIALAVTLTQTQNKVSSLEGQVNQIEGQIQRQQGFLGQTTAFSQQFGSLIDRVSKVGNTITLLGGDIANVARDAGQGDPELARLFFTAALTEVRTLQVDAS

SEQ ID NO: 312 - protein, 266 aa, Unknown
  Spicies not identified
MSNGILSQSIANMQQAEATIQSFSGLPQNAVNIQQNVGEVVAALLPQVQTMQQQVLAFAARLELQLTQQLANTGPFNPEALKAFVDLVQQEIAPIQTLTAQTLTASQTANDRITQDNIALQRIGVELQATIAGLQSNLDGARQELDSLNKKKLYLLGLGLLGLPGLIALAVTLTQTQNKVSSLEGQVNQIEGQIQRQQGFLGQTTAFSQQFGSLIDRVSKVGNTISLLGGDIANVARDAGQGDPELARLFFTAALTEVRTLQVDAS

SEQ ID NO: 313 - protein, 266 aa, Aeromonas hydrophila
MSNGILSQSIANMQQAEATIQSFSGLPQNAVNIQQNVGEVVAALLPQVQTMQQQVLAFAARLELQLTQQLANTGPFNPDALKAFVDLVQQEIAPIQTLTAQTLTASQTANDRITQDNIALQRIGVELQATIAGLQSNLDGARQELDSLNKKKLYLLGLGLLGLPGLIALAVTLTQTQNKVSSLEGQVNQIEGQIQRQQGFLGQTTAFSQQFGSLIDRVSKVGNTISLLGGDIANVARDAGQGDPELARLFFTAALTEVRTLQVDAS

SEQ ID NO: 314 - protein, 266 aa, Aeromonas piscicola
MSNGILSQSIANMQQAEAVIQSFTGLPQNAVNIQQNVEEVVAALLPQVQTMQQQVLAFGTRLEAQLVQQLANTGPFNPEALKAFVDLVQQEIAPIQMLTAQTLTASQTANDRITQDNIALQRIGVELQATIAGLQSNLAGARQELDSLNKKKLYLLGLGLLGLPGLIALAVTLTQTQNKVNSLEGQVNQIEGQIQRQQGFLGQTTTFSQQFGSLIDRVSKVGNTITLLGGDIANVARDAGQGDPELARLFFTAALTEVRTLQVDAS

SEQ ID NO: 315 - protein, 266 aa, Aeromonas dhakensis
MSNGILSQSIANMQQAEATIQSFSGLPQNAVNIQQNVGEVVAALLPQVQTMQQQVLAFAARLETQLTQQLANSGPFNPDALKAFVDQVQQEITPIQTLTAQTLAASQAANDRITQDNIALQRIGVELQATIAGLQSNLAGARQELDSLNKKKLYLLGLGLLGLPGLIALAVTLTQTQNKVSSLEGQVNQIEGQIQRQQGFLGQTTAFSQQFGSLIDRVSKVGNTITLLGGDIANVARDAGQGDPELARLFFTAALTEVRTLQVDAS

SEQ ID NO: 316 - protein, 266 aa, Aeromonas popoffii
MSNGILSQAIANMQQAEATIQSFSGLPQGAINIQHNVTEVIANLLPEVLTMQQQVLVFGQRLEGQLEQQLANPNGLTPQSLQDFINLVQDEITPIQSLMAHTLGASQAANSRILQDNLDLQRIGVELQATIAGLQSSLAGARQELDELNKKKLYLLGLGLLGLPGLIAMAVTLSQAQSKVNSLEGQVSQITGQIQRQQGFLGQTNAFSQNFSTLIDRLTKVGNTITILGGDIANVAHDAGQRDPEVARLFFTAALMEVKTLINDAS

SEQ ID NO: 317 - protein, 267 aa, Erwinia mallotivora
MSNGMLSQAISNIQQLQATINGFSGLPQQAIAIQQSTSALLNDLLPQVQEMQKQVLALGITLQSQLNQQMAILNTQSADQLRAALQQVQTEISPVDGLVNQTITAGKAANEKIIQDNIELQQIDVSLQNSIAGLQSNLAGANQQLDTLNKQKYYWLALGILGVPGLIAMAVELSKAQDNVNGLQGQINQIQQQIQSQQGFFTQTQSLSGNFTTLVDKLTGLGSAITFLSRDIGNITHDLDDDVPRQQIQLLFSVALMEVNTLVTDAS

SEQ ID NO: 318 - protein, 272 aa, Vibrio campbellii
MGTKTDGILSQAIANMQASEKVIAQFSGLPRNAVTIQQSMETTVNHLVPQIQSMQADALSFADSIDDEINNQLAILDTETDVELQSFVDHVQQEAKSTQVAVDDCLEQVRQANKTIAENSQALQTITVDLKATIAGLQSNLDGEKRELDALNKQKYYLIGLGIFGIPGLIALAVLISNAQDKVHHLESQVRATQNQINQQESFLLQTQYFTQDLSDVMDKVGKVANSISFIVGDIDNIASDIQHGDITNRNQIRLYFMAANQELKTLIHDVS

SEQ ID NO: 319 - protein, 267 aa, Serratia liquefaciens
MSDGMLTQVINNLSRTGEAIQKFSGLPANAVKIQHNIQNAIGTLLPDIKQMQREVATWGQKLETQLDEKLAALESLSPSELSQFIQQSVGEIAQISSLIAKVKDHTRNTDDTLTENNMTLQRIIIDLQATIAGLQSNLQGSQQKLDELNKKKLYFIALGILGIPGLIAMAVMLSDAQSKVNSLERQIASQQSDIRQQQSFATQSTAFSQDLLDLSNHMLKIGNAIEIVSNDIKNAEKNITDGDEQQLTKLFFTAAKMSVKTLLVDIS

SEQ ID NO: 320 - protein, 267 aa, Serratia plymuthica
MSGGMLTQVINNLSRTGEAIQKFDGLPANAIPIQRNIQSAINTLLPDIKQMQRDVTTWGLKLEAQLDEKLAVLESLSPSELTMFIRQSKEEITKVMSQVDKVKDRTKNTDNTVVDNNITLQRIIIDLQATIAGLKSNLQGSQQKLDELNKKKYYFIALGILGIPGLIAMAVLLSEAQSNVNSIERQISAQQSDIRQQQSFATQTVAFSQDLLELSNHMLKIGNAIEFVSNDIQKAEKNISGGEAAQLTKLFFTAAKMSVKTLLVDAS

SEQ ID NO: 321 - protein, 272 aa, Vibrio campbellii
MGTKTDGILSQAIANMQASEKVIAQFSGLPSNAVTIQQSMETTVNHLVPQIQSMQADALSFADSIDDEINNQLAILDTETDVELQSFVDHVQQEAKSTQVAVDDCLEQVRQANQTIAENSQALQTITVDLKATIAGLQSNLDGEQRELDALNKQKYYLIGLGIFGIPGLIALAVLISDAQDKVHHLESQVRATQNQINQQESFLLQTQYFTQDLSDVMDKVGKVANTISFIVGDIDNIASDIQHGDITNRNQIRLYFMAANQELKTLIHDVS

SEQ ID NO: 322 - protein, 266 aa, Chromobacterium piscinae
MANGILTQALNNLLQTEATIRSFQGLPDSAVSIQRNAEQVVDQLVPQIRTLQTDTQSVGLRLQSQIQGLLANFDQASPQQIKDSVSQMQAEAGPLSQQLQTVQQACFSSNNQLANDSQQLQAITAQLQANIAGLQSNLAGAQQELDALNKKKLYLIGLGILGLPGLIAMAVLLSQAQDKVNDLEGQIKSLQSQINQQQSFRDQTSHFSGDMSDLIDKVGKINNSLQFVSSDLVNALNDLDQNNKAAAKVFLTAASMEINTMLQDAS

SEQ ID NO: 323 - protein, 267 aa, Serratia marcescens
MSSGMLTQVIDNLSRTGDAIQTFPGLPANAVLLQRNIQTAVNMLLPDLKQMQRDVTAWGVKLEAQLDDKLAALETLPVTELSRFIRQSKEDIAGVMAQVSRVQSRTQSTDVTVTENNLALQRIIIDLQATISGLQSNLQGSQQQLDELNKKKLYFIALGILGIPGLIAMAVLLSQAQDKVRSIERQISEQKSSIRQQQSFATQTAAFSQDLLELSNQMLKIGNAIEFVSNDINNAEKNLSGAEAQQLAKLFLTAAKMSVGTLLTDIS

SEQ ID NO: 324 - protein, 267 aa, Serratia
MSDGMLTQVINNLSRTGEVIQTFSGLPANAVPIQHNIQNAVGTLLPDLKQMQREVISWGQKLEVQLDEKLAVLESLSPAELGLFIRQSKEGIAQVMGQVAKVKDRAKSTDNTVTDNNMALQRIIIDLQATIAGLRSNLQGSQQKLDELNEKKYYFIALGIFGIPGLIAMAVLLSEAQKKVGNLERQIASQQSDIRQQQSFATQTQAFSQDLLDLSNHMLKIGNAIEIVGNDINNAEKNLSAGEAQQLTKLFFTAAKMSVQTLLVDVS

SEQ ID NO: 325 - protein, 272 aa, Vibrio species
MGTNTDGVLSQAITNMQASEKVIAQFSGLPSNAVTIQQSMETTVNHLVPQIQSMQADALSFADSIDDEINNQLAILDTETDVELQSFVDHVQQEAKSTQVAVDDCLEQVRQANKTIAENSQALQTITVDLKATIAGLQSNLDGEQRELDALNKQKYYLIGLGIFGIPGLIALAVLISNAQDKVHHLESQVRATQNQINQQESFLLQTQYFTQDLSDVMDKVGKVANSISFIVGDIDNIASDIQHGDITNRDQIRLYFMAANQELKTLIHDVS

SEQ ID NO: 326 - protein, 267 aa, Serratia ureilytica
MSSGMLTQVIDNLSRTGDAIQTFPGLPANAVLLQRNIQTAVNMLLPDLKQMQRDVTAWGVKLEAQLDDKLAALETLPVTELSRFIRQSKEDIAGVMAQVSRVQSRTQSTDVAVTENNLALQRIIIDLQATISGLQSNLQGSQQQLDELNKKKLYFIALGILGIPGLIAMAVLLSQAQDKVRSIERQISEQKSSIRQQQSFATQTAAFSQDLLELSNQMLKIGNAIEFVSNDINNAEKNLSGAEAQQLAKLFLTAAKMSVGTLLTDIS

SEQ ID NO: 327 - protein, 272 aa, Salinivibrio species
MTTSTNGILSQAIANMQASEKIIRQFSGLPSNAIAIQQSVEHTVTSILPQIQQMQTQVLSFAESLSDKLQKQIELVDTESAAALQAFVNDIQQQAKPTQQLVQESLQQTRNANASITQNIQALEKISVQLKANIAGLQSNLQGEQQELDALNKKKYYLLGLGVFGAPGLIALGVLISKAQDKVHGLESQIKSCQTQINQQQAFLMQTQHFNQDFSDLTDKVSKVGNALSFVIGDVNNIAGDIEHDGITDRGQIKLYFTAASQELKSLVNDAS

SEQ ID NO: 328 - protein, 266 aa, Chromobacterium amazonense
MANGILTQALNNLLQTEATIRSFQGLPDSAVSIQRNAEQVVDQLVPQIRTLQTDTQSVGQRLQSQIQGLLANFDQASPQQIKDSVSQMQAEAGPLSQQLQTVQQACFSSNNQLANDSQQLQAITAQLQANIAGLQSNLAGAQQELDALNKKKLYLIGLGILGLPGLIAMAVLLSQAQDKVNDLEGQVKSLQSQINQQQSFRDQTSHFSGDMSDLIDKVGKINNSLQFVSSDLVNALNDLDQNNKAAAKVFLTAASMEINTMLQDAS

SEQ ID NO: 329 - protein, 267 aa, Serratia marcescens
MSSGMLTQVIDNLSRTGDAIQTFPGLPANAVLLQRNIQTAINMLLPDLKQMQRDVTAWGVKLEAQLDDKLAALETLPVTELNRFIRQSKEDIAGVMAQVARVQSRTQSTDAAVTENNLALQRIIIDLQATISGLQSNLQGSQQQLDELNKKKLYFIALGIFGIPGLIAMAVLLSQAQDKVRSIERQISEQKSSIRQQQSFATQTAAFSQDLLELSNQMLKIGNAIEFVSNDINNAEKNLSGAEAQQLAKLFLTAAKMSVGTLLTDVS

SEQ ID NO: 330 - protein, 267 aa, Serratia marcescens
MNSGMLTQVIDNLSRTGEAIQKFPGLPANAVALQRNIQGAVNALLPDLKHMQRDVTAWGVKLAAQLDEKLAMLETLSMTELSVFIRQSKEEIAGVMDQVAKVKTRTQSTDAAVIENNLALQRIIVDLQATIAGLQSNLQGSQQQLDELNEKKLYFIALGIFGIPGLIAMAVLLSQAQDKVRSFERQISEQRSNIRQQQSFATQTATFSQDLLELSNQILKIGNAIEFVSNDIGNAEKNLSSAEAQQLAKLFLTAAKMSVGTLLTDVS

SEQ ID NO: 331 - protein, 267 aa, Serratia plymuthica
MSSGMLTQVINNLSRTGETIQTFSGLPPKAIPIQHNVQNAIDVLLPDIKQMQHEVTSWGLKLEAQLDEKLAVLESLSPAELALFIRQSKKDISRVTDQVKKVKESTKNTDNTVIENNKALQRIIINLQESIASLESDLQGSQQKLEALNKQKLIFVAMGMLGLSRLSILMSQIFDMQNKVGQLVHQIQLLQFDIRQQQSFVTQTGAFSQGLLVLSNQMLRIDNTIEMISNDIRNAEKNVSGGEAQQLTKLFFTAAKMSVRTLLVDAS

SEQ ID NO: 332 - protein, 151 aa, Pseudomonas gessardii
MEQDQINVLWSLFGFIGQKWGTAADCQMPQQQFQQALQWQMQRDPAYLGYYRQTIAEYQALLQQYHTPTFALAALINQNPYSSSNPSPVANYVLLEFMRWNIAFGGFKTFGYMNYNGWMGGGSFLNKPPPYRALNIQAQTQPVGGDHGQGA

SEQ ID NO: 333 - protein, 532 aa, Pseudomonas gessardii
MAKVRNESANIVIVGSGVAGSLMASRFANHPGVVILETGPSIPMGDPGWWFHHVARGGGTGNTPYAAFYDQAADFDATGANPWNIQGGRIFGAGGTMLHWGGWVPRFKPEDFALYSNTGQGIDWPFGYDQLEPFYNQAERYLGASGDSSDNNPPRSQPYPYGAAPYPISAGPFIQAFARVRPAIGFGHLPVARYGQANGMGGPCRTTGTCDYCPVAGRFTGDQPLALLADNPNVSLRLGAAVTAIRMVNRQQVAGVTYTDMNTGDTVLLDAQNVILCNGAFEIPKLLQASTSSYWPKGIGNDRDLVGRFVSATQFFYASGTAPNPQKFEEELGFPSLCSRTFDAPQYQKDGKFFISMNYETPNIDVGLMMAQGYSASQIRDACTAPAKYQLYGNLSAIPQFNNRVSCAVGTTRFGLPRTSIYTPDPLFDPLKAQIYVDKLKTVLAQMGCTDVGWGTYPQRGDHVACTTRMANDPNLGVVNPQLQVFGVDNLYVVSNSVMPTLPAANPTLTLVALAMKAMGGDTALARLAKSA

SEQ ID NO: 334 - protein, 120 aa, mountain pine beetle microbes
QFQQALQWQMQRDPAYTGYYRDTIAEYQALLRQYGQPSLALAALITQNPYSPSNPSAVANFVLLEFMRWNIAFGGFKTFGYMNYNGWMGGGSFLQQPPPYRALNIPVQNLPVGGDHGQGA

SEQ ID NO: 335 - protein, 150 aa, Burkholderia ubonensis
MNDDQINVLWAVFGYIGENWGTASTCTMPQAQFQQVLQWQIQRDPAYKNDYLATVTEYQLLLRQYGSPAAALARLFAENELPDPKLPDVANHVLLEFMRWNVAFGGFKTFGYENYNGWMGGGSYLTQPPPYRALPGEHVVSGPTAGGRYV

SEQ ID NO: 336 - protein, 129 aa, Candidatus Entotheonella species
MQSEVLWTVFGYIDSHWDVNTEMSKTRFEQALASQVGLDPVYQLRYDETAAAYQAELEQHGNIEAALEALYSKNTAPKPAQPDVAQVLGEFMKWNVAFGGFRSFGYMNYPGWTGNGSFLNDPPPYRALP

SEQ ID NO: 337 - protein, 532 aa, Pseudomonas gessardii
MAKVRNESANIVIVGSGVAGSLMASRFANHPGVVILETGPSIPMGDPGWWFHHVARGGGTGNTPYAAFYDQAADFDATGANPWNIQGGRIFGAGGTMLHWGGWVPRFKPEDFALYSNTGQGIDWPFGYDQLEPFYNQAERYLGASGDSSDNNPPRSQPYPYGAAPYPISAGPFIQAFARVRPAIGFGHLPVARYGQANGMGGPCRTTGTCDYCPVAGRFTGDQPLALLADNPNVSLRLGAAVTAIRMVNRQQVAGVTYTDMNTGDTVLLDAQNVILCNGAFEIPKLLQASTSSYWPKGIGNDRDLVGRFVSATQFFYASGTAPNPQKFEEELGFPSLCSRTFDAPQYQKDGKFFISMNYETPNIDVGLMMAQGYSASQIRDACTAPAKYQLYGNLSAIPQFNNRVSCAVGTTRFGLPRTSIYTPDPLFDPLKAQIYVDKLKTVLAQMGCTDVGWGTYPQRGDHVACTTRMANDPNLGVVNPQLQVFGVDNLYVVSNSVMPTLPAANPTLTLVALAMKAMGSDTALARLAKSA

SEQ ID NO: 338 - protein, 530 aa, Unknown
  Spicies not identified
MAKVRNESANIVIVGSGVAGSLMASLCASLDGVVILETGPSIPMADPGWWFHQVARGGGTANTPYAAYYDQAADFDATGANPWNIQGGRIFGAGGTMLHWGGWVPRFKPEDFALHTNTGQGIDWPFGYNQLEPFYNQAEQYLGASGDSSDNNPPRSQPYPYGAAPYPISAGPFIQAFRQLNIDYGHLPVARYGQANDKGGPCRTTGTCDYCPVAGRFTGDQPLALLAGNPNVSLRLGAAVTAIRMLSKQQVAGVTYTDLTSGDTVELDAQNVILCNGAFEIPKLLQASTSNFWPNGIGNDNDLVGRFVSATQFFYASGTAPNPQAFEEELGFPSLYSRTYDSPECQKCGKFFISMNYEKPNIDLGLLMAQGQSISQIQAACTAPATFQLYGNLSAIPQYNNRVTCAPGTTRFGLPRTLINTPDPLFNPAAAQKYVGILESVLLKMGCSGVNSGTYPQRGDHVACTTRMANSASDGVVSPELQVFGVDNLYVVSNSVMPTLPAANPTLTLVALVMRAMGSDTALARLTKKA

SEQ ID NO: 339 - protein, 536 aa, Burkholderia ubonensis
MRQDSADIVIVGSGVAGSLMANALSGAGDMVVLDCGPAIPMGDPGWWFHHVAAGGGTGNTPYAASYDLASDFIAIGQHPWNIVGGRIFGAGGTTLHWGGWAPRFMPEDFRLFSNTGQGIDWPYGYNDLEPYYNAAESYLGVSGDSTDPDPPRSKPYPYGPAPYPISAGPFIEAFEQMGISYGHLPVARYGQANRNIGPCRTTGTCDYCPVAGRFTGDQPLALLSGNPKVQVRLGAAVTAIRMRHAQQAAGVTYTDLATGDVVQLDAQIVILCNGAFEIPKLLLASKCSEWPQGIGNAHDLVGRFVSATQFFYASGANPNPQAFEEELGFPSLYSRAFDTPAYQRQGKFFVSMNYETPNVDIALLMAQGKSADQIRAATTAPATFQLYGNLSAIPQYDNRVTCADGYTRFGLPRTRIDTPMPLYDDAAAQQYTKILEAVLTAMGCGSVKSGTYPQRGDHVACTTRMASTDSAGVVNPDLQVWGVDNLYIVSNSVMPTLPAANPTLTLVAMALKVLNSGSGDLARLAKKGSAAGVAVT

SEQ ID NO: 340 - protein, 517 aa, Candidatus Entotheonella species
MSRAIIVGSGVAGSFMAHALLDRGVSEVVMLDAGTHVAMADQAWWLHFVATGGAPYHANYDAKSDFVAEGMNPWNIEGGRIFGRGGTTLHWGGWVPRFKPEDFRLYSNTGLGLDWPFDYNDFEPYYLQAENWLGVSGDSQSQDPPRSGPYPFEAAPYPLSAERFIRAFDELGYSYGHLPMARFGRSLNGSGACITTGTCDYCPVGGRFTGNQPVDRLEQRPGFRLQLGAAVRQIRMASRAVAAGVTYTDLATGESEELDADTVFLCAGAFETPKLLLASRCAEWPQGIGNDCDLVGRFLVANGFFFANGQADNPQRLTQELGFPSLVSRHFDTEKEQATAKLFLTMNYSRPYLNLAEEMAKGQSRADLDRAAVGPASFQLYGNVSPLGQYENRVGLADGTTRFGLPKTLVDTPEPARDEDAFKQWMELTENILKTMGCSNVTSGTYPQRGDHAACTTRMALTPEQGVVDPQHRVFGTDNLFILSNAVLPTLSAANPTLTLVALGYRLVETCGAELMG

SEQ ID NO: 341 - protein, 543 aa, Pseudomonas syringae
MNTDVLIIGSGVAATAVANRLLQSDPNRAILIIEAGTRVKMQDQVLWDDFMVSGSSYSKLPYFKYNDLDYPERDAPGENLNVGATVVPLAGSRVMTYGGSTIHWGGWSFRLKPEDFKLKSNTGQGADWPIDYAELEPFYNQAECYIGVSGDSENQDPPRSAPYPFPAFPYTLEDQPAYRAMNSLGLSTANVPIARHGSTNTTSRHAPCKTTGTCKYCPFGARYAAPNFLDDMANWGNFPNFRVMDNCVVEDVIMSSRNRASGVTYIDKMTGQRSTVEASTVIVAGGAIESPKLLLRSRSEHWPNGVGNDHDLVGRYFVTHPYFVFSATVDNNPKRLLTEMDFPTLCSRYFDSPQEQAKGKFILINPPTSFTPLVNGKTMGVAQMMQNGMSREDIESAVKGSAQVQIHGMLEIPSDYTNRVKNLDTRNRIGLPETLVDYSQSQDFNARMQEIGVHVGRIFEGMDATVSAPPSISWRADHSACTCRMSDSEQEGVIDKDLKVFGVDNLYVCSNASFPNTGAINPTLTLTALALRLGEHLATSVQS

SEQ ID NO: 342 - protein, 524 aa, Duganella species
MTASRVYDYVIVGSGVAGVSLAKRLLEDDPETAILMLEAGPFIPSRDRRSWWDYITLNRAPYDFTYDQDWEVPSTGNVNWLSAGTRVKAVGGSTMHWGAWSLRFKPEDFQLYTNTGEGADWPIGYNDLEDYYNQAEEFLSVCGDDAEDWSPRSKPYPAPPFAWTAADGEMIEAFQALGIKPGKMPIARYRKCLTTGTCKYCPFGARFSAQNVLTEMTDNKRFVNFELRANTPVTEVRMRSKEEVDGLDCIDNTTGTHYIVQASRYVICSGSYETPKLLMKSKNQYWPQGVGNDHDLLGRFIISHSMLKVRGRTPANPNRWFQEYDFPTLMSRSYDTPERQKIGKIFLFKDRVRPNTDIAALMIAGKTPEEVDTIVSGPMEMELQAFMEEKGKFDNRLQIAEGYDRFGLPLTTVSFSRTEQENINTQANLDLMQEVIVKMGYEVVYAKTEDPGAHHTTGTCRMGATPEMGVTDSDLKVFATDNLYLCSNGVFPSGSAVNPTLTLTALSMRLSDHFLAHPINKAQP

SEQ ID NO: 343 - protein, 543 aa, Unknown
  Spicies not identified
MNTDVLIIGSGVAATAVANRLLQSDPNRAILIIEAGTRVKMQDQVLWDDFMVSGSSYSKLPYFKYNDLDYPERDAPGENLNVGATVVPLAGSRVMTYGGSTIHWGGWSFRLKPEDFKLKSNTGQGADWPIDYAELEPFYNQAECYIGVSGDSENQDPPRSAPYPFPAFPYTLEDQPAYRAMNSLGLSTANVPIARHGSTNTTSRHAPCKTTGTCKYCPFGARYAAPNFLDDMANWGNFPNFRVMDNCVVEDVIMSSRNRASGVTYIDKMTGQRSTVEASTVIVAGGAIESPKLLLRSRSEHWPNGVGNDHDLVGRYFVTHPYFVFSATVDNNPKRLLTEMDFPTLCSRYFDSPQEQAKGKFILINPPTSFTPMVNGKTMGVAQMMQNGMSREDIESAVKGSAQVQIHGMLEIPSDYTNRVKNLDTRNRIGLPETLVDYSQSQDFNARMQEIGVHVGRIFEGMDATVSAPPSISWRADHSACTCRMSDSEQEGVIDKDLKVFGVDNLYVCSNASFPNTGAINPTLTLTALALRLGEHLATSVQS

SEQ ID NO: 344 - protein, 506 aa, Unknown
  Spicies not identified
MSLAKRLLEDDPETAILMLEAGPFIPSRDRRSWWDYITLNRAPYDFTYDQDWEVPSTGNVNWLSAGTRVKAVGGSTMHWGAWSLRFKPEDFQLYTNTGEGADWPIGYNDLEDYYNQAEEFLSVCGDDAEDWSPRSKPYPAPPFAWTAADGEMIEAFQALGIKPGKMPIARYRKCLTTGTCKYCPFGARFSAQNVLTEMTDNKRFVNFELRANTPVTEVRMRSKEDVDGLDCIDNTTGTHYIVQASRYVICSGSYETPKLLMKSKNQYWPQGVGNDHDLLGRFIISHSMLKVRGRTPANPNRWFQEYDFPTLMSRSYDTPERQKIGKIFLFKDRVRPNTDIAALMIAGKTPEEVDTIVSGPMEMELQAFMEEKGKFDNRLQIAEGYDRFGLPLTTVSFSRTEQENINTQANLDLMQEVIVKMGYEVVYAKTEDPGAHHTTGTCRMGATPEMGVTDSDLKVFATDNLYLCSNGVFPSGSAVNPTLTLTALSMRLSDHFLAHPINKAQP

SEQ ID NO: 345 - protein, 537 aa, Salmonella enterica
MHYDYILIGSGVAATVLTQSLLDSDPNKAILILEAGPRIELRDRRSWWDIAILGKETSPPYEKTYDVESGTDAESSWTGTQWGFKESRVRALGGSTLHWGGWSLRYQPEDFELFSRTGKGADWPFSYDELEPWYTAAETLLSVGGIADEPGPPRTSPYPLPAFPWSAHEALLADAFDARKLVPGHMPIARFKRCMTTGTCKYCPIGSRYTATDHLASLLQNPAHIGLSLKTDSPVIRLVAGPSRVHGVRVLNINNGSEEVIMANCIVVCAGAYESPKLLLRSTSEHWPNGIGNRYDQVGRYLVTHTMVRVRGTLEKNDEHWFQEYDFPTLMSRTWDNPDRQSAGKVFVFNNRSLPNIDIASLMSEGKSRQQIDQIIGGPRNAGLDAFVEEFGVFNNRITLGAGVGKFGLPHTYVHFERNADFQAVTSKVLEEMMLILNSAGYQPASVKPTDVQIPRGDHSSGTCRMGKDETSSVTDLNLQVHGLENLYVCSNAVLPNASAVNPTLTLTALALRLGAYLSDKVPQLLAQETEIHAKST

SEQ ID NO: 346 - protein, 546 aa, Tenacibaculum ovolyticum
MKNKYDYIIVGAGVAAATVARGLLLHKHDTSILILEAGPEVKAKDRRFWWDYITKGERPYTYTYDQKFEAGSTGNIEYQTDGVRVKAYGGSTIHWGAWSLRFKPEDFNLYTNTGLGADWPINYEDLESYYNDAESYLSVCGDENENWVPRSKPYPVPPFQWTAADGEMIKAWEQLDVKYQDGDINPGTKSKIKSGKMPVARYRKCMTTGTCKYCPIGGRFNAQYVLDDLKNDPRFINFEVLVNSPVHHVNVSSKSKIDSVTFTDNHNGKEHTVAGDTVILASGAYNVPKLLRASKNNYWKDGIGNDQDLVGRFVVSHSMLNVVGKAKSNPNGWFQEYDFPTLMSHSYNTKEHQKKGKIFMFKNRTTPNTDIAQLMIDGKTREEIDAIVYGEMEVNIQAFLEEKGKHSNRLEARPGVDRFGLPQTTVHFSRTDEEMANAKDRLQLLEEIMLKMGLEITSSRVDKPGGHHTTGTARMGTSPSNSVTDKFMRVHDTDNLYVCSNAAFPTGSAVNPTLTLTALAFRLVEHLTNPSKLTETSKKKEWEHQL

SEQ ID NO: 347 - protein, 531 aa, Dickeya solani
MRVDTLIIGSGIAAAALSQRLLDHDPHASILLLEAGGRVKMQDYNTWTTYLVNGKLPYEKYYDLPYPERDHPGENLNAGGTEIPLAGARALTYGGSTIHWGGWSFRLKPEDFFLHSNTGESIDWPFDYHELEPYYCAAEHYIGVSGDSHDPTVPRSAGYPFPAFPYTLEDQPMATAMESLGIGYSHVPIARHGMTDTVSRHAPCQTTGTCKYCPFGARYAATNFLNDMQTWENHENFHIRTNVIVEKILMDGKQSATGVECVDKEGGQTEVIHAKRIIVAAGTIESAKLLLRSTSTNWPGGLGNQHDLVGRNFITHPYFIFTANLPDNPQALQPEMNFPTLCSRHFGSPEEQAKGKFMLINPPGSPLLNLAQQMQNGLTREKMDAYVSGPTQIQLHGMLEVFSRYDNRILNFNKINHLGMEETLVDYTKDATFDQRMMEIQSHVNQLFGQIGATLAGKPSISWRADHAACVTRMSHDEKQGVVDPHLRIHGTDNVYVCSNAVFPSTGAINPTLTLTALSLRLADHLHHRGL

SEQ ID NO: 348 - protein, 533 aa, Pedobacter steynii
MRNYEYIIVGSGVAGTTIAKRLLEHNPLTAILMLEAGPVIPSKDRRAWWDYITLNRTPYDYTYDKKWEAKSVGTTNWLSEGARVKAVGGSTMHWGAWSLRFKPEDFQLHSNTGQGADWPISYDDLEAYYQQAEEYLAVCGDEDEKWSPRSKPYPMPPFEWTAADGLMIKAFEEMDIKPGKMPLARYRKCFTTGTCKYCPFGSRFSAVDILTELLENKKYVNFTLRPNTPVRKINCESKDKIASIECLNNLTGEVSLEKASHYIICSGSYETPKLLMNSKNEFWEKGVGNDEDLCGRFIISHSMLKVRGTFPENKERWFQEYDFPTLMSRSYDTPGRQAIGKIFLFKDRVQPNQNIAKLMIAGKNCDEIDAIMSGPMTIELQAFMEEKGKYDNRLEIMEGTDRFGLPLTKISFSRTEEENENALKNLEIMKEVILKMGCTINPGDARVDEPGAHHTTGTCRMGKTAADGVTDENLKVHGISNLYLCSNGVFPTGSAVNPTLTLTALSFRLSDLLIQQSNLLTQWNHKTSQPQKI

SEQ ID NO: 349 - protein, 520 aa, Mycobacterium species
MIVGSGIAATLVCDRLLEADPLVSILVLEAGERIPSRDRRSWWDLVLGRRTPYSGTYDVDTDDDGSDQESFSTGNTPWIFRESRVRAYGGSTMHWGGWSLRFKEEDFRCRTNTGRGADWPFDYDTLEPWYGLAEQVLAVGGDDSDKEGPRRGCNYPLPPYVWTAHESKLASAFGEIGLTPAHMPIARFKRCMTTGTCKYCPISARYSAQDHMDTLLFESAHRNFVLKTNSPVRRIVAERNRVQGVEYLNLSTGERSTAYANNVIVCAGTYESTKLLLASVSPEWPTGLGNRYDQVGRHIVTHLLFSVEGKRKDNSDRLFQEYDFPTLMSRSWDTEGRQAEGKMFVFNNRSLPKFEFEKHMINCRTRDDIDKILTGESRAGLSAFIEEFGDPQNRLTLAPGIGKFGLPKTRINFSRREPPEFFNRVRRAQDELFRCLKKLDYQREETRLEYPRGDHASGTCRMGHSPDSSVTNADLAVHDIDNLFVCSNAVLPNAAAVNPTLTLAALALRLGSHLGQSGLQ

SEQ ID NO: 350 - protein, 164 aa, Chromobacterium aquaticum
MLLISRSPHMTIDRDQKSGLFIVSYNVNKPGQAGGLNLRLDLTVYTPSRHITGRATITHATLQPLVFEHPIQGRYEEQGRDIELHLVGAPRLHDQHAQNQAHAAGHALLEQFFFDGQLKDGWQAGNNSKARYAFFQNQQWHEQLGQEVRLADEINNAIKALNLR

SEQ ID NO: 351 - protein, 155 aa, Chromobacterium species
MTIDRDQKSGLFIVSYNVNKPGQAGGLNLRLDLTVYTPSRHVTGRATITHATLQPLVFEHPIQGRYEEQGRDIELHLVGAPRLHDQHAQNQAHAAGHALLEQFFFDGQLKDGWQAGNNSKARYAFFQNQQWHEQLGQEVRLADEINNAIKALNLR

SEQ ID NO: 352 - protein, 164 aa, Unknown
  Spicies not identified
MLLISRSPNMTIDRDQKSGLFIVSYNVNKPGQAGGLNLRLDLTVYTPSRHITGRATITHATLQPLVFEHPIQGRYEEQGRDIELHLVGAPRLHEQHAQNQAHAAGHALLEQFFFDGQLKDGWQAGNNSKARYAFFQNQQWHEQLGQEVRLADEINNAIKALNLR

SEQ ID NO: 353 - protein, 164 aa, Unknown
  Spicies not identified
MLLISRSPNMTIDRDQKSGLFIVSYNVNKPGQAGGLNLRLDLTVYTPSRHITGRATITHATLQPLVFEHPIQGRYEEQGRDIELHLVGAPRLHEQHVQNQAHAAGHALLEQFFFDGQLKDGWQAGNNSKARYAFFQNQQWHEQLGQEVRLADEINNAIKALNLR

SEQ ID NO: 354 - protein, 155 aa, Chromobacterium haemolyticum
MTIDRDQKSGLFIVSYNVNKPGQAGGLNLRLDLTVYTPSRHITGRATITHATLQPLVFEHPIQGRYEEQGRDIELHLIGAPRMHDQHAQNQAHAAGHALLEQFFFDGQLKDGWQAGNNSKARYAFFQNQQWHEQLGQEVRLADEINNAIKALNLR

SEQ ID NO: 355 - protein, 164 aa, Unknown
  Spicies not identified
MSLISRSPNMTIDRDQKSGLFIISYNVNKPGQAGGLNLRLDLTVYTPSRHITGRATITHATLQPLVFEHPIQGRYEEQGRDIELHLIGAPRLHEQHAQNQAHAAGHALLEQFFFDGQLKDGWQAGNGSKARYAFFQNQQWHEQLGQEVRLAEEINSAIKALNLR

SEQ ID NO: 356 - protein, 155 aa, Chromobacterium
MTIDRDQKSGLFIISYNVNKPGQAGGLNLRLDLTVYTPSRHITGRATITHATLQPLVFEHPIQGRYEEQGRDIELHLIGAPRLHDQQAQHQAHSAGHALLEQFFFDGQLKDGWQAGNGSKARYAFFQNQQWHEQLGQEVRLAEEINSAIKALNLR

SEQ ID NO: 357 - protein, 147 aa, Chromobacterium
MASQDRDQKSGLFIVSYNIFKPGITGGYNLHLLLSVYPPARQVSGRAVITQALQHPLVFENPVQGRYEEKGGDIELFLHGFRLPIDSGSPRAGDFHFDGHLKGGWHAENGSRARYAFLQAGHWVEEVGQDIQLSDEVRHTVKALNLR

SEQ ID NO: 358 - protein, 147 aa, Chromobacterium violaceum
MASQDRDQKSGLFIVSYNVFKPGVAGGYNLHLQLSVYPPARQVSGRAVITQALQHPLIFENPVQGRYEEKGGDIELFLNGFRLPIDPASPRVGDFHFDGHLKGGWHAENGSRARYAFLQTGHWVEEFGQDIQLSDEVRHTVKALNLR

SEQ ID NO: 359 - protein, 147 aa, Pseudogulbenkiania ferrooxidans
MASQDRDQKSGLFIVSYNVFKPGIAGGYNLHLQLSVYPPARQVSGRAIITQALQHPLVFENPVQGHYEEKSGDIELFLNGFRLPIDPGSPRVGDFHFDGHLKGGWQAENGSRARYAFLQAGHWIEEYGQEIQLSDEVRQTVKALNLR

SEQ ID NO: 360 - protein, 156 aa, Chromobacterium piscinae
MANHLDRDQKSGLFLVRYEVFKPGVAGGYHLHLNLSVYPPTRHVSGETIITQALAQPVVLRVPVQGQYEQAGNDIDLFLTGRPLLQAQQSSQPPHILPPQFEDFFFDGLLKQGWKAASGSLARYAFLHNGRWVEEVGQDIQLERELQNAHKALNLA

SEQ ID NO: 361 - protein, 156 aa, Chromobacterium subtsugae
MANQLDRDQKAGLFIVSYNVFKPGVDGGYKLQLKLSVYPPSRRVSGEAVITHATAQPLVFKSPVQGHYEENGSNIELFLFGHQLPQAQGQHPQQQAHAPLGEDFHFDGQLKGGWQADAGSKARYAFLQNGHWTEVSGQDIHLSDELRHAAKSLNLR

SEQ ID NO: 362 - protein, 147 aa, Unknown
  Spicies not identified
MASQDRDQKSGLFIVSYNVFKPGVAGGYNLHLQLSVYPPARQVSGRAVITQALQHPLIFENPVQGRYEEKGGDIELFLNGFRLPIDPASPRVGDFHFDGHLKGGWHAENGSRARYAFLQAGHWVEEFGQDIQLSDEVRHTVKALNLR

SEQ ID NO: 363 - protein, 156 aa, Unknown
  Spicies not identified
MANQLDRDQKAGLFIVSYNVFKPGVDGGYKLQLKLSVYPPSRRVSGEAVITHATAQPLVFKSPVQGHYEENGSNIELFLFGHQLPQAQGQHPQQQAHAPLGEDFHFDGQLKGGWQADAGSKARYALLQNGHWTEVSGQDIHLSDELRHAAKSLNLR

SEQ ID NO: 364 - protein, 156 aa, Chromobacterium
MANQLDRDQKAGLFIVSYNVSKPGVAGGYNLQLKLSVYPPSRRVSGEAVITHATAQPLVFKSPVHGHYEENGSNIELFLAGHNLLQTQGQQGQQQAHALPGEDFHFDGHLKGGWQADAGSKARYAFLQHGHWTEVIGQDIQLSDELRHTVKSLNLR

SEQ ID NO: 365 - protein, 156 aa, Chromobacterium amazonense
MANHLDRDQKSGLFLVRYEVFKPGVAGGYHLHLNLSVYPPTRHVSGEAIITQALAQPVVLRVPVQGQYEQAGNDIDLFLTGRPLLQAQQSSQPPHILPPQFEDFFFDGLLKQGWKAASGSLARYAFLHNGRWVEEVGQDIQLERELQNAHKALNLA

SEQ ID NO: 366 - protein, 687 aa, Chitinophaga pinensis
MSIFDFPRINFKGLVSINVGTANNDDYSGEQFVGGPYNGMPVRLADSANVQPMLYGMDDDTWVKWAVTPLSVYNPPPPSAAKAAPRRFEGKPAIQENTANSTIIPGEWNYYGDMGLDMINVNVTGVNDPGNVIPSSLMSTIRSSQLSYLNRPGPNGRSTGMVIDINPEDPTNTQVFTDALSLMAGDSVVFSAKPSKAMTRWINFTRNGALTGPNGAAAMFQCVLPLSVLQGQSILQGMPATSPTGQPLAGIVCRYTIYRPLQKINVFKYNPQQWIDQMLQLYATQGVNPDFLELQGTIAPWFQGDAISQTTGRYLEPVPFPFPNGWKGNTMGSSTMSLPPVILQYSKQNRQISIDLSPVLPDLYQGAPDYDPMVTGNDPKYNLGTITLAVAFDPTQGLDAALPIGQINYMDMATNDANGWIFDFTWNAFIDSALNDGYKFYLYCGGSQGINQAIHIEKPLFLFSETSGVYAEQDTSSPNASTNRFRDDGADTVPISFIGYQNGQKLTNNGGNTFDLWYYDTTPNQSPGPATLLLSGYNLGDPITLGVFKNGNVLITCTTRDNPPPINYGQFNPLTGSIINVRVLPNDEDYSQYYKDPSSPQPTGNDRLTFDVIYTKVLRNYYLLYPAMSRVLKLNDPSIWQDPVMARALLDRISLPQWNTAIAMPRTRDLSASRRKLLTAWCLKIIN

SEQ ID NO: 367 - protein, 440 aa, Chitinophaga pinensis
MKYLITGLLLCTGLMAAAQAPYTITLQKASAQPAPALQSYAIAVQNGLWLLVGGRTNGFHGTSGPGSTFPTSKSNQSIWVIDPVNNRSWKGNIPPALQYQLSSTNMAFYQDGNTLYCIGGYGAGCPNDSCYQTFPLITAIDVQRTIAAVQNGYALNNYIKTTQDSRMAVTGGYLTKLNDWFHLVMGQDYNGKYSGGVTGKYTEQIARFKLITLNGAPVISSYNVITTNQSYNGANQFHRRDYPSVKMVMPANRNVGVAVFGGVFNNQGGPFLNPVYFEDMGFNTLAQIDTSFKQRYCLYDCAAISAFNSASNEAYVSFIGGITDWYIDDQGHEVPGNASNFMPWFNRVSTIVRGLKGTQEYPQLNSTLPGYIGANAAFLINPQIAVMGKTEDVIDYAKLPSGKSLIGWMFGGIEATAPQSNGFNPTSAGSTIYEVWLQKN

SEQ ID NO: 368 - protein, 688 aa, Unknown
  Spicies not identified
MSIFDYPRINFKGLVSINVGTANNDDYSGEQFAGGPYNGMPVRLADSANVQPMLYGMDDDTWVKWAVTPLSVYNPPAPSAIKSSPRRFEGKPAVVENTANSTIIPGEWNYYGDMGLDMINVNVTGVNDPGNVIPSSLMNTIRSSQLSYLNRPGPNGRSTGMVIDINPEDPTNTQVFTDALSLMSGDNVVFSGKPSKAMTRWINFTRNGALTGPNGAAAMFQCVLPLSVLQGQSILQGMPSSSPTGQPLAGIVCRYTIYRPLQKINVFKYNPQQWINEMLQLYATQGINPDFLELQGTIAPWFQGDAISQTTGRYLEPVPFPFPTGWKGNTMGSSTMSLPPVILQYSKQNRQISIDLSPVLPDLYQGAPDYDPLVTGNDPKYNLGTITLAVAFDPTQGLDAALPIGQINYMDMATNDANGWIFDFTWNAFVDAALNDGYKFYLYCGGSQGINQAIHIEKPLFLFSETSGVYAEQDTSTPLATTNRFRDYGADTVPISFTGYKDGQPMTNNGGYTFDLWYYDTTPNQAPGPATLLMHGYNLGDPITLPVYNNGNVLITCTPHDNPPPSNYGQFNPLTGSIINVRVLPNNEDFSRYYKDPSSPQPTGNDLLTFDVVYEKVLRNYYLLYPAMSRVVKLNDPSIWQDPVMARALLDRISLPAWNTAVAMPRTRDLSESRRKLLTAFCLKIINP

SEQ ID NO: 369 - protein, 694 aa, Chitinophaga species
MSIFDYPRINYKGLISINVGTANNDDYSGEQFVGGPYNGQPVRLADSASVQPMTYGMDDATWVKWAVTPLGVYNPPPSNPCAITAKRFEGERPAPSVEVTTNDTIFPGEWNYYGDMGLDMIGVKVTGINDPKNFIPSSLKSTIQSSQLSFLNRTGPNGRSSGMVIDINPEDPTNTQIYTDFLSLISGDTAVFTGKPSKAMTRWINFFKNGNLTGPNGAAAMFQCVIPMSELTGQPILQGMPATSPTGQSLTGIVCRFTVYRPLQKINVFKYKGQAYIDAMTALYATQGTNSDFLEIQGTIAPWFQGDAISQTTGRYLEPQTFPWPIGWKGNRMGAPQMQIPPAILYYRNYDQFKQIPGQISIDLSAVLPDMYLGNYDPMVTGNNPKFDMGQLYLAIGNPANLNDPNTLVLGQINYMDLQANDANGWVFDFTWNAFINAKVNNGEPFFLYVSGPMGINQAIHIEKPLFLFSETSGVYAEQNTVTPNATTTQFRDYGPGTVPISFIGYKNGVPLTNNGGYDYQLWYYDTTPNQAPGNAMKLQDNYNLGDPISLPVSKKGNVLITCTPSDTPPPSCYAQFNPLTGSIINVRVLPNDEDYSQYYKDPNSPTPTGNDKLTWDVVYNKVLRNYYLLYPAMSQVVNLSDPAIWKDPVMARALMGRISLDVWNTASAMPRTRDLSDSRRKLLNAWCLKVINP

SEQ ID NO: 370 - protein, 251 aa, Switchgrass rhizosphere metagenome
MAIFDFPRFNVKGLIAVNVGTANNDDYSGYQFPSGNFYPGQPVRLADSKNVQPITYGMTDDQWVKWVQSSIPVYDPPQTAGAKKAAKFFARYEAEPANNNVIPGEWNYYGDMGLTMINVKLTGINDPNHNVTAGLSTLMRAATLSFSNRPGTNGRSTGMLIDINPEDPTNSQVFTDNLAMMTDTQVVFNGKPSKAMTRWINFQRNANLTGPNGAAATFQCVVPLSELQGQAILQGLPSKSTSGKALAGIVC

SEQ ID NO: 371 - protein, 676 aa, Arsenicibacter rosenii
MSIFNFPRINIKGLMAVNVGTANNDDYSNDVFPPGSQYAGQPVRLADSVNVQPLMYGMTDDEWITWVQTKGTFSDPPAKTTALQMARSEGSTATADAPTYLIPAEWNFYGDMGLTMMGVAVQGVTDPDKIIPDYLLSELQTATLSFNNRPDQTGRSTGMLIDINPEDPSNSQIFADFLSLQSGNSFLFSGKPSKAITRWINFQRNVNLTGPNGAAASFQCVIPLSELQGQPILDGMPNRSPSGQPLAGVVCRMVMFRSMQGINTFNYPGDTWFDQIEALYAKKGLNPTYVQLQGTIAPWFEGEMKSAPTGRYLIPGTNTIPVPAGCRANGPAVALAPAIATIDPVNYVVSIDLSASLPEKYAGSYDPMETSTNPKYDFGTLCLDIVYQGNTTTIASIPYTDMDNDKTGWLFDFPFDAGLLTAIQDGTLAISSPTYGTLLYESIYYVVSDQSGVYAEQDTTVATTSQFRDYGADTTEISFTVFRKGAIDTNTPLALWYYDTTPNQQPGNRQPLMLPYTSGQPISLPVDSPGNRLITAVPATYSLPPLSYGQFSLLTFPIINIRILPNNVDYSQYYVNPEDPQPVGNELLTFDVIYNEVLRNYYLLYPAMSMRIPLNDPTYWNDAEMAGRLMQRISLDYWALSEAMPRTRDLSASRRTLLTAWCLKFFGNTNAPSPVV

SEQ ID NO: 372 - protein, 440 aa, Unknown
  Spicies not identified
MKYLITGLLLCTGLFAAAQAPYTITLQKAASQPAPALQSYAIAVQNGLWLLVGGRTNGFHGTSGSGSTFPTSNSNQNIWVIDPVNNRSWKGNIPAALQYQLSSTNMAFYQDGNILYCIGGYGAGCPGDSCYQTFPQITAIYVDKTIAAVQNGYATDNSIKTTQDSRMAVTGGYFTKLNNWFHLVMGQNYNGKYSGGVTGKYTEQIARFTLSTLNGAPVVSNYQVITTPMQYNGANQFHRRDYPSVKMVMPANRNVGVGVFGGVFNNQGGPFVNPVYFEDMGFNTLASIDTSFKQRYCLYDCASISAFNSATSEAYVSFIGGITDWTIDENGNEIPGNASNFMPWFNRVSTLVRTYNSIKEYPQKNSTLPGYIGGNAAFIIHPKIAVMPKTEDVIDYAKLPSGNTLIGWMYGGIEATAPQSNGFNPTNASSTIYEVWLQKN

SEQ ID NO: 373 - protein, 440 aa, Chitinophaga species
MKHLILGLFLFATITAAAQAPYTISLKKAANQPAPALQSFCIAVQNGLWLVVGGRTNGFHGTAGSGSTFPSSESNKFIWVIDPVNNKSWKGNIPTALQYQLSSTNIAFYQDGNTLYCIGGYGAGCANDGCYQTFGQITAIDVQRTIAGVQNGFALNNYITTTQDSRMAVTGGYLVKLNDWFHLVMGQNYTGKYSGAVTGKYTEQIARFKISTSGGNPVVSNYTTITTGEQYNGANQFHRRDYPSVTMVMPANRNVGVGVFAGVFNNQGGPFVNPVYFEDMGFNTLARVDTSFKQRFCMYDCAAISCYNSATTEAYISFIGGITDWYIDDSGNEVPGNASNFMPWFNRVSTIVRTANTTKEYPQKNTTLPGYIGANAAFIIAPNTPVMSKTTDVIDYARLGSGNTLIGWMYGGIEATAPQSSGLNPTNSSGTIYEVWLQKN

SEQ ID NO: 374 - protein, 326 aa, Switchgrass rhizosphere metagenome
TKAPALQSFCIGTSGNYWLLVGGRTNGFHGTGGSSSTFPSSYDNEKFYVIEPNGNNVWSAPVPSQFLYQLRSTNMPYYQDGATLYCIGGYGNGCPSDTPGCYQTFPILTAINVPGLINAIRTGGSNLTQYIKSITDNRMQVTGGTLTKLNGYFYLAFGQNYTGKYKPGVDGKYTEQVARFMINLSNGVPSISNYTTIKSPMQYQGQPQFHRRDFNGVPYVTANGQQGFALLGGVFTSRGGPFPNPAYIYYTGGVGVDTSFTQKFCLYDCASISLYNNRNQQAYVTLIGGITDYYFGEDGDTIPSNASNFMPWFNHASTIVYTQRGT

SEQ ID NO: 375 - protein, 486 aa, Arsenicibacter rosenii
MKSCLSILLAVVLTVANQAFAQNAKTKRRPATTSVLSATTAANQNTGRIFSQKATNVPASAPFSIQMSAISWTGAPTLQSYAMGQFQGYLLLIGGRTNGFHGTSDNESTFPTKYSNTNMFVLDVANQKVWSLPVPAAVKGQLSSSNMEYEQDGNVLYCIGGYGSSCGNDSAACYQTFPTLTAINVPNAINAIQSNNPGALAASILAVTDERMRITGGSLHKLGNWFYLVMGHNYNTQYRGGVTGIYSQQVRRFQIGNTGSSLSIQNYQAYNAPWSGAFLSDQFHRRDLNVVETVMPDNTTGLTVYGGVFTQQSGAYLNPIYMFQTPAGSPYFGIDTTYKQSFNLYDCAHIGLYSSRTRQMMTSLLGGITFYYYDKKGKLEESNLLNFMPFSNWATTIVRNADFTTYEIPQQTPTLPGYIGSDAVFIPATNTPIYPGTKGIIDYDKLGSGRILLGWVYGGIVATAPQSSEFNPTFANNKLYEVYLNR

SEQ ID NO: 376 - protein, 431 aa, Archangium gephyra
MPATLPFHLEVSESSKSLPKGVQSFAFATSGGKWLFVGGRTNGFHLTATSMRTFPVAYANTQLLVFDPVSGRSWSRDLPAAYLSRLSATNTESHQDGDTLYVVGGYGSNCGKDTASCYGTYPNLTALKVKDVIDAVVAGNDAKLASSIVSIEDTRFQVAGGVLRKVGDYFYLVMGQNYSRIYSAGVSGAYTEQVRRFKLGFDGQTLTVSDYQAFGDPKGAQGTESQFHRRDLNVTEAITPSGNPGLNVWGGVFTADDGGWSHPIYIEPRGSEAPTLTVDANFEQKTNYYECANLLMYDATTGSMYTTLFGGISNYYYTQTGELVPGGTTNSLPFTNIISTLGRASNGTREYIQPMNQGLPALIGANAELVLAPGLPLVQGSHAIVDYTKLTGNRVLVGYIVGGIRATAWQASGTNPTYPLEKLYEVYVVRP

SEQ ID NO: 377 - protein, 107 aa, Pseudomonas brassicacearum
MSSINGTYVSYNSDAKLVVTDGNDSNGSFSGQITQAGVNYNVTGHYHFQNSTGQPTIIAFTGYNDGHGYVTFAAFSPDHNYGKLRASGSRTTFDGQVVGLGGEFVKQ

SEQ ID NO: 378 - protein, 107 aa, Pseudomonas brassicacearum
MSSINGTYVNANSDAKLVVTDGNDSNGSFSGQITQAGVNYNVTGHYHFQNSTGQPTIIAFTGYNDGHGYVTFAAFSPDHNYGRLRASGSRSTFDGQVVGLGGEFVKQ

SEQ ID NO: 379 - protein, 107 aa, Pseudomonas fuscovaginae
MSSINGTYVNSNSNAKLVVTDGNDANGSFSGQITQAGVNYNVTGHYHFQNSTGQPTIIAFTGYNDGHGYVTFAAFSPDHNYAKLRASGSRTTFDGEVVGLGGEFVKQ

SEQ ID NO: 380 - protein, 107 aa, Unknown
  Spicies not identified
MSSINGTYVSYNSDAKLVVTDGNDSNGSFGGQLTQAGVNYNVTGHYHFQNSTGQPTIIAFTGYNDGHGYVTFAAFSPDHNYGKLRASGSRTTFDGQVVGLGGEFVKQ

SEQ ID NO: 381 - protein, 107 aa, Unknown
  Spicies not identified
MSSINGTYVNANSDARLVVTDGNDSNGSFSGQITQAGVNYNVTGHYHFQNSTGQPTIIAFTGYNDGHGYVTFAAFSPDHNYGRLRASGSRSTFDGQVVGLGGEFVKQ

SEQ ID NO: 382 - protein, 107 aa, Pseudomonas parafulva
MSSINGTYVNANSNAKLVVTDGNDANGTFSGQISQAGVNYDVTGHYHFQNNTGQPTTIAFIGTNAGHGYVAFAAFSADHNYAKLRANGSRTNFDGEVVGLGGEFVKQ

SEQ ID NO: 383 - protein, 107 aa, Unknown
  Spicies not identified
MSSINGTYLNNNADAKLVVTDGNDSNGTFNGQITQAGVNYSVTGHYHFQNSTGNPTTISFIGTNSDKGYVAFTAYSPDHIYVKLRASGSRTGFDGQVVGLGGEFVKQ

SEQ ID NO: 384 - protein, 107 aa, Pseudomonas chlororaphis
MSSINGTYVNSNADARLVVTDGNDSNGSFSGELTQAGVKYSVTGHYHFQNSTGQPTIISISAYNDGYGYQAWALFSPDHNYGRLRASGARTNFSGDVVGLSGEFLKQ

SEQ ID NO: 385 - protein, 107 aa, Unknown
  Spicies not identified
MSSINGTYVNSNADARLVVTDGNDSNGSFSGELTQAGVKYSVAGHYHFQNSTGQPTIINVSGYNDGYGYQAWALFSPDHNYSRLRASGARSNFSGDVVGLSGEFVKQ

SEQ ID NO: 386 - protein, 107 aa, Pseudomonas protegens
MSSINGTYVNHNADARLIVTDGNDANGSFSGELTQAGVKYSVAGHYHFQNSSGQPTIINVSGYNDGYGYQAWALFSPDHNYARLRASGARSNFSGDVVGLSGEFVKQ

SEQ ID NO: 387 - protein, 214 aa, Pseudomonas monteilii
MSSINGTYVNSNADARLVVTDGNDSNGSFSGELTQAGVKYSVAGHYHFQNSTGQPTIINVSGYNDGYGYQAWALFSADHNYARLRASGARSNFSGDVVGLSGEFLKQMSSINGTYVNSNADARLVVTDGNDSNGSFSGELTQAGVKYSVAGHYHFQNSTGQPTIINVSGYNDGYGYQAWALFSADHNYARLRASGARSNFSGDVVGLSGEFLKQ

SEQ ID NO: 388 - protein, 107 aa, Unknown
  Spicies not identified
MSSINGTYVNYNADARLVVTDGNDSNGSFSGELTQAGVKYSVTGHYHFQNDAGKPTTISISAYSHDYGHQAWALFSPDHNYGRLRASGARTNFSGDVVGLSGEFLKQ

SEQ ID NO: 389 - protein, 108 aa, Pseudomonas frederiksbergensis
MSSINGTYVNSNSGAKLVITDGNDSNGTFSGKLSQGGVNYDVAYGHYHFQNSTGQPTIITLTGLNDGTGYQAWTLFSPDHNYSRLRAAGSRNNFDGDVVTLGGEFVKQ

SEQ ID NO: 390 - protein, 107 aa, Unknown
  Spicies not identified
MSSINGTYVNSNADARLVVTDGNDPNGSFSGELTQAGVKYSVTGHYHFQNNSGQPTTISFSAYNFDYGYQAWALFSPDHKYGRLRALGARTNFSGDVVGLSGEFLKQ

SEQ ID NO: 391 - protein, 108 aa, Pseudomonas rhodesiae
MSSINGTYVNANAGAKLVITDGNDSNGSFSGKLSQNGVNYDISFGHYHFQNSTGQPTIITIAALNDGTGYQAWTLFSPDHNYSKLKAFGSRNNFDGDVVGLAGEFVKQ

SEQ ID NO: 392 - protein, 108 aa, Unknown
  Spicies not identified
MSSINGNYVNANAGAKLTITDGNDSNGTFSGKFSQNGVNYDIAYGHYHFQNSTGQPTIITFAALNDGTGYQSWTLFSPDHNYSKVRAVGSRTNFDGDVVGLAGEFVKQ

SEQ ID NO: 393 - protein, 107 aa, Pseudomonas chlororaphis
MSSINGTYVNSNADARLVVTDGNDSNGSFSGELTQAGVKYSVTGHYHFQNSTGQPTIISFSAYNDGYGYQAWALFSPDHNYARLRASGGRTNFSGDVVGLSGEFLKQ

SEQ ID NO: 394 - protein, 107 aa, Pseudomonas species
MSSINGTYVNSNADARLVVTDGNDSNGSFSGELTQAGVKYSVAGHYHFQNSSGQSTIINVSGYNDGYGYQAWALFSPDHNYSRLRASGARSNFSGDVVGLNGEFVKQ

SEQ ID NO: 395 - protein, 108 aa, Pseudomonas
MSSINGTYVNSNSGAQLVITDGNDSNGTFSGKLSQGGVNYDVSYGHYHFQNSTGQPTIITLAALNDGTGYQAWTLFSPDHNYSRLRAVGSRNNFDGDVVGLAGEFVKQ

SEQ ID NO: 396 - protein, 108 aa, Pseudomonas fluorescens
MSSINGTYVNANAGAKLTITDGNDSNGTFSGKLNQNGVNYDIAYGHYHFQNSTGQPTIITFAALNDGTGYQSWALFSPDHNYSKVRAAGSRTNFDGDVVSLAGEFVKQ

SEQ ID NO: 397 - protein, 108 aa, Unknown
  Spicies not identified
MSSINGIYVNANAGAKLTITDGNDSNGTFSGKLNQNGVNYDITYGHYHFQNSTGQPTIITFAALNDGTGYQSWALFSPDHNYSKVRAAGSRTNFDGDVVNLAGEFVKQ

SEQ ID NO: 398 - protein, 108 aa, Unknown
  Spicies not identified
MSSINGIYVNANAGAKLTITDGNDSNGTFSGKLNQNGVNYDITYGHYHFQNSTGQPTIITFAALNDGTGYQSWTLFSPDHNYSKVRAVGSRTNFDGDVVGLAGEFVKQ

SEQ ID NO: 399 - protein, 108 aa, Pseudomonas species
MSSINGTYVNDNAGAKLVITDGNDSNGTFSGTFSQGGVNYDVSYGHYHFQNSTGQPTTITFTGLNGSSGFQAWSLFSPDHNYKKVRAVGSRTNFDGEVVGLAGEFIKQ

SEQ ID NO: 400 - protein, 108 aa, Unknown
  Spicies not identified
MSSINGTYVNSNTGAKLVITDGNDSNGTFSGSFSQGGVNYEVSYGHYHFQNSTGQPTIITFTGLNDGTGYQAWALFSPDHNYSRLRAAGARNNFDGDVVLLGGEFVKQ

SEQ ID NO: 401 - protein, 108 aa, Unknown
  Spicies not identified
MSSINGTYLNSNSGAKLVITDGNDSNGSFSGTLSQGGVNYDIRYGNYHFQNSTGNPTTIAVLAQNGNSGYQTWTLFSPDHNYAKLRAAGSRTNFDGDVVTLGGEFVKQ

SEQ ID NO: 402 - protein, 325 aa, Unknown
  Spicies not identified
MTSLDSLQQRQISLTHAFVVNNAALHSQSWKNMKNPTPSQVTDNILSRLNASKVGGGYDVVWGPALVMDGEHAAHITVVLAGENDIVVVTSGTLKDSLKDQVDDLDIFPMVPLKSVIPGCQVPANIAEGTSKGVNAILTTASTVGSQGTLCDFLGKQQSGATIRLVGHSLGGALMSVVALYLKDKFPGFNLFCETFAAPTAGDGLFASYFNKQMAGNALRIYNTLDVVPMAWCATSLDYSLTLYEDDPKENTRNMVCSCIDKVVNNNLNYTQWGMGSANMELRLCGELQSDCTSYESQSGYQHVYEYMTLLGLQPGDIPMPPFGS

SEQ ID NO: 403 - protein, 107 aa, Unknown
  Spicies not identified
MSSINGTYVNSNADARLVVTDGNDSNGSFSGELTQAGVKYNVAGHYHFQNSTGQPTIINVSGYNDGYGYQAWALFSPDHNYSRLRASGARSNFSGDVVGLSGEFVKQ

SEQ ID NO: 404 - protein, 107 aa, Unknown
  Spicies not identified
MSRINGTYVNHNADARLIVTDGNDSNGSFSGELTQAGVKYSVAGHYHFQNSSGQPTIINVSGYNDGYGYQAWALFSPDHNYARLRASGARSNFSGDVVGLSGEFVKQ

SEQ ID NO: 405 - protein, 107 aa, Unknown
  Spicies not identified
MSSINGTYVNSNADARLVVTDGNDSNGSFSGELTQAGVKYSVAGHYHFQNSTGQSTIINVSGYNDGYGYQAWALFSADHNYARLRASGARSNFSGDVVGLSGEFLKQ

SEQ ID NO: 406 - protein, 108 aa, Unknown
  Spicies not identified
MSSINGTYVNSNSGAKLVITDGSDSNGTFSGKLSQGGVNYDVAYGHYHFQNSTGQPTIITLTGLNDGTGYQAWTLFSPDHNYSRLRAAGSRNNFDGDVVTLGGEFVKQ

SEQ ID NO: 407 - protein, 107 aa, Unknown
  Spicies not identified
MSSINGTYVNSNADARLVVTDGNDPNGSFSGELTQAGVKYSVTGHYHFQNNSGQPTTISFSAYNFDYGYQAWALFSPDHKYGRLRALGARTNFSGDVVGLSGEFLRQ

SEQ ID NO: 408 - protein, 108 aa, Unknown
  Spicies not identified
MSSINGNYVNANAGAKLTITDGNDSNGTFSGKFSQNGVNYDIAYGHYHFQNSTGQPTIITFTALNDGTGYQSWTLFSPDHNYSKVRAVGSRTNFDGDVVGVAGEFVKQ

SEQ ID NO: 409 - protein, 108 aa, Unknown
  Spicies not identified
MSSINGNYVNANAGAKLTITDGNDSNGTFSGKLSQNGVNYDIAYGHYHFQNSTGQPTIITFAALNDGTGYQSWTLFSPDHNYSKVRAVGSRTNFDGDVVGLAGEFVKQ

SEQ ID NO: 410 - protein, 107 aa, Unknown
  Spicies not identified
MSSINGTYVNSNADARLVVTDGNDSNGSFSGELTQAGVKYSVTGHYHFQNSTGQPTIISISAYNDGYGYQAWALFSPDHNYARLRASGGRTNFSGDVVGLSGEFLKQ

SEQ ID NO: 411 - protein, 108 aa, Unknown
  Spicies not identified
MSSINGTYVNANAGAKLTITDGNDSNGTFSGKLNQNGVNYDIAYGHYHFQNSTGQPTIITFAALNDGTGYQSWALFSPDHTYSKVRAAGSRTNFDGDVVSLAGEFVKQ

SEQ ID NO: 412 - protein, 108 aa, Unknown
  Spicies not identified
MSSINGTYVNANAGAKLTITDGNDSNGTFSGKLNQNGVNYDITYGHYHFQNSTGQPTIITFAALNDGTGYQSWALFSPDHNYSKVRAAGSRTNFDGDVVNLAGEFVKQ

SEQ ID NO: 413 - protein, 108 aa, Unknown
  Spicies not identified
MSSINGIYVNTNAGAKLTITDGNDSNGTFSGKLNQNGVNYDITYGHYHFQNSTGQPTIITFAALNDGTGYQSWALFSPDHNYSKVRAAGSRTNFDGDVVNLAGEFVKQ

SEQ ID NO: 414 - protein, 108 aa, Unknown
  Spicies not identified
MSSINGTYVNANSGAKLVITDGNDSNGSFSGTLSQGGVNYDIRYGNYHFQNSTGNPTTIAVLAQNGNSGYQTWTLFSPDHNYAKLRATGSRVNFDGEVVNLGGEFVKQ

SEQ ID NO: 415 - protein, 108 aa, Unknown
  Spicies not identified
MSSINGTYVNSNSGAQLVITDGNDSNGTFSGKLSQGGVNYDVSYGHYHFQNSTGQPTIITLAALNDGTGYQAWTLFSPDHNDSRLRAVGSRNNFDGDVVGLAGEFVKQ

SEQ ID NO: 416 - protein, 107 aa, Pseudomonas
MSSINGTYVNSNADARLVVTDGNDSNGSFSGELTQAGVKYSVAGHYHFQNSTGQPTIINVSGYNDGYGYQAWALFSPDHNYARLRASGARSNFSGDVVGLSGEFLKQ

SEQ ID NO: 417 - protein, 108 aa, Pseudomonas brassicacearum
MSSINGTYVNANAGARLVITDGNDSNGTFSGKLSQNGVNYDVSYGHYHFQNSSGNPTIITVAALNDGVGYQAWTLFSPDHNYSKLKAFGSRNNFDGDVVGLAGEFVKQ

SEQ ID NO: 418 - protein, 108 aa, Unknown
  Spicies not identified
MSSINGTYVNANAGAKLVITDGNDSNGTFSGKLSQNGVNYDVSYGHYHFQNSSGNPTIITVAALNDGVGYQAWTLFSPDHNYSTLKAFGSRNNFDGEVVGLAGEFVKQ

SEQ ID NO: 419 - protein, 107 aa, Pseudomonas chlororaphis
MSSINGTYVNSNADARLVVTDGNDPNGSFSGELTQAGVKYTVTGHYHFQNNSGQPTTISFSAYNFDYGYQAWALFSSDHKYGRLRALGARTNFSGDVVGLSGEFLRQ

SEQ ID NO: 420 - protein, 108 aa, Pseudomonas frederiksbergensis
MSSINGTYLNSNTGAKLVITDGNDSNGTFSGSFSQGGVNYEVSYGHYHFQNSTGQPTIITLAALNDSTGYQAWTLFSPDHNYSRLRAAGSRNNFDGEVVLLAGEFVKQ

SEQ ID NO: 421 - protein, 108 aa, Pseudomonas fluorescens
MSSINGTYVNANSGAKLVITDGNDSNGSFSGTLSQGGVNYDIRYGNYHFQNSTGNPTTIAVLAQNGNSGYQTWTLFSPDHNYAKLRATGSRVNFDGEVVNLGGEFLKQ

SEQ ID NO: 422 - protein, 108 aa, Serratia plymuthica
MSSINGTYVNANAGAKLTITDGNDSNGTFSGTFSQGGVNYDVSYGHYHFQNSTGQPTTITFVGLNGNSGFQAWSLFSPDHNYAKVRAAGSRTNFDGEVVTLAGEFVKQ

SEQ ID NO: 423 - protein, 108 aa, Pseudomonas species
MSSINGNYVNANAGAKLTITDGNDSNGTFSGKFSQNGVNYDIAYGHYHFQNSTGQPTIITFTALNDGTGYQSWTLFSPDHNYSKVRAVGSRNNFDGDVVGLAGEFIKQ

SEQ ID NO: 424 - protein, 108 aa, Pseudomonas species
MSSINGNYVNANAGAKLTITDGNDSNGTFSGKFSQNGVNYDIAYGHYHFQNSTGQPTIITFAALNDGSGYQSWTLFSPDHNYSKVRAVGSRTNFDGDVVGVAGEFIKQ

SEQ ID NO: 425 - protein, 108 aa, Pseudomonas species
MSSINGTYVNANAGAKLTITDGNDSNGTFSGKLSQNGVNYDIAYGHYHFQNSTGQPTIITISALNEGTGYQAWTLFSPDHNYSKVRAAGSRNNFDGDVVSLAGEFVKQ

SEQ ID NO: 426 - protein, 108 aa, Pseudomonas fluorescens
MSSINGTYVNANAGAKLVITDGNDANGTFSGQFSQGGVNYDVSYGHYHFQNSTGQPTTITFVGLNGNSGFQAWSLFSPDHNYSKVRAAGSRTNFDGEVVLLAGEFVKQ

SEQ ID NO: 427 - protein, 108 aa, Unknown
  Spicies not identified
MSSINGNYVNANAGAKLTITDGNDSNGTFSGKFSQNGVNYDIGYGHYHFQNSTGQPTIITFTALNDGTGYQSWTLFSPDHNYSKVRAVGSRNNFDGDVVGVAGEFVKQ

SEQ ID NO: 428 - protein, 108 aa, Unknown
  Spicies not identified
MSSINGNYVNDNAGAKLTITDGNDSNGTFSGKFSQNGVNYDIAYGHYHFQNSTGQPTIITFAALNEGTGYQSWTLFSPDHNYSKVRAVGSRTNFDGDVVGLAGEFLKQ

SEQ ID NO: 429 - protein, 108 aa, Unknown
  Spicies not identified
MSSINGTYVNANAGAKLVITDGNDSNGTFSGKLSQNGVNYDVSYGHYHFQNSSGNPTIITVAALNDGVGYQAWTLFSPDHNYSTLKAFGSRNNFDGDVVGLAGEFVKQ

SEQ ID NO: 430 - protein, 108 aa, Unknown
  Spicies not identified
MSSINGTYVNANAGAKLVITDGNDSNGTFSGKLSQNGVNYDVSYGHYHFQNSSGNPTIITVTALNDGVGYQAWTLFSPDHNYSTLKAFGSRNNFDGDVVGLAGEFVKQ

SEQ ID NO: 431 - protein, 108 aa, Unknown
  Spicies not identified
MSSINGTYVNANAGAKLVITDGNDSNGTFSGKLSQNGVNYDVSYGHYHFQNSSGNPTIITVTALNDGVGYQAWTLFSPDHNYSTLKAFGSRNNFDGEVVGLAGEFVKQ

SEQ ID NO: 432 - protein, 108 aa, Unknown
  Spicies not identified
MSSINGTYVNANAGAKLVITDGNDSNGTFSGKLSQNGVNYDVGYGHYHFQNSSGNPTIITVAALNDGVGYQAWTLFSPDHNYSTLKAFGSRNNFDGDVVGLAGEFVKQ

SEQ ID NO: 433 - protein, 107 aa, Unknown
  Spicies not identified
MSSINGTYVNSNADARLVVTDGNDPNGSFSGELTQAGVKYSVTGHYHFQNNSGQPTTISFSAYNFDYGYQAWALFSSDHKYGRLRALGARTNFSGDVVGLSGEFLRQ

SEQ ID NO: 434 - protein, 107 aa, Unknown
  Spicies not identified
MSSINGTYVNSNADVRLVVTDGNDPNGSFSGELTQAGVKYSVTGHYHFQNNSGQPTTISFSAYNFDYGYQAWALFSSDHKYGRLRALGARTNFSGDVVGLSGEFLRQ

SEQ ID NO: 435 - protein, 107 aa, Unknown
  Spicies not identified
MSSINGTYVNSNADASLVVTDGNDPNGSFSGELTQAGVKYSVTGHYHFQNNSGQPTTISFSAYNFDYGYQAWALFSSDHKYGRLRALGARTNFSGDVVGLSGEFLRQ

SEQ ID NO: 436 - protein, 108 aa, Unknown
  Spicies not identified
MSSINGTYVNANAGAKLTITDGNDANGTFSGTFSQGGVNYDVSYGHYHFQNSTGQPTTITFVGLNGNSGFQAWSLFSPDHNYAKVRAAGSRTNFDGEVVTLAGEFVKQ

SEQ ID NO: 437 - protein, 108 aa, Unknown
  Spicies not identified
MSSINGTYVNANAGAKLTITDGNDSNGTFSGTFSQGGVNYDVSYGHYHFQNSTGQPTTITFVGLNGNSGFQAWSLFSPDHNYARVRAAGSRTNFDGEVVTLAGEFVKQ

SEQ ID NO: 438 - protein, 108 aa, Unknown
  Spicies not identified
MSSINGSYVNANAGAKLTITDGNDSNGTFSGKFSQNGVNYDIAYGHYHFQNSTGQPTIITFTALNDGTGYQSWTLFSPDHNYSKVRAVGSRNNFDGDVVGLAGEFIKQ

SEQ ID NO: 439 - protein, 108 aa, Unknown
  Spicies not identified
MSSINGNYVNANAGAKLTITDGNDSNGTFSGKLSQNGVNYDIAYGHYHFQNSTGQPTIITFAALNDGTGYQSWTLFSPDHNYSKVRAVGSRTNFDGDVVGVAGEFIKQ

SEQ ID NO: 440 - protein, 108 aa, Unknown
  Spicies not identified
MSSINGNYVNANAGAKLTITDGNDSNGTFSGKFSQNGVNYDIAYGHYHFQNSTGQPTIITFAALNEGTGYQSWTLFSPDHNYSKVRAVGSRTNFDGDVVGLAGEFVKQ

SEQ ID NO: 441 - protein, 108 aa, Unknown
  Spicies not identified
MSSINGNYVNANAGAKLTITDGNDSNGTFSGKFSQNGVNYDIAYGHYHFQNSTGQPTIITFAALNDGTGYQSWTLFSPDHNYSKVRAVGSRTNFDGDVVGLAGEFIKQ

SEQ ID NO: 442 - protein, 108 aa, Unknown
  Spicies not identified
MSSINGNYVNANAGAKLTITDGNDSNGTFSGKFSQNGVNYDIAYGHYHFQNSTGQPTIITFAALNDGTGYQSWTLFSPDHNYSKVRAVGSRNNFDGDVVGLAGEFVKQ

SEQ ID NO: 443 - protein, 108 aa, Unknown
  Spicies not identified
MSSINGNYVNANAGAKLTITDGNDSNGTFSGKFSQNGVNYDIAYGHYHFQNSTGQPTIITFAALNEGTGYQSWTLFSPDHNYSKVRAVGSRTNFDGDVVGLAVEFVKQ

SEQ ID NO: 444 - protein, 108 aa, Pseudomonas fluorescens
MSTINGNYVNANAGAKLTITDGNDSNGTFSGKFSQNGVNYDIAYGHYHFQNSTGQPTIITFTALNDGTGYQSWTLFSPDHNYSKVRAVGSRTNFDGDVVGVAGEFVKQ

SEQ ID NO: 445 - protein, 108 aa, Pseudomonas species
MSSINGNYVNANAGAKLTITDGNDSNGTFSGKFSQNGVNYDIAYGHYHFQNSTGQPTVITFAALNEGSGYQAWTLFSPDHNYSKVRAVGARTNFDGDVVGLAGEFIKQ

SEQ ID NO: 446 - protein, 110 aa, Chromobacterium haemolyticum
MSKINGTYKNNNINAQLVIAGANDSNGTFSGRYTQDGQEYEIMSGAGHYHFTAGGKTGTAISFVVNNNTLGFQSWSLYSPDMSFSSLRGNGAKAFRDGTYYGFGGEFVRV

SEQ ID NO: 447 - protein, 108 aa, Bradyrhizobium elkanii
MSRLQGTYVNDNIGAKLVISKANDSNGQITDASISYNGQNYPATGHYHFKDSTGPTTVAVLTGLDDDTGYVALSLTAENQEFKRLKSFGGLANFDAETIGLGGAFIRL

SEQ ID NO: 448 - protein, 108 aa, Bradyrhizobium species
MSRLQGTYVNDNIGAKLVISQANDSNGQIAAASISYNGHNYPATGHYHFKNSTGPTTVAVLTGLDDDTGYVALSLTAENQEFKRLESFGGLVNFNAETIGLGGAFIRQ

SEQ ID NO: 449 - protein, 108 aa, Bradyrhizobium elkanii
MSRLQGTYVNDNIGAKLVISQANDANGQITAASISYNGHNFPATGHYHFKNSTGPTTVAVLTGLNDDIGYVALSLTAENQEFKRLKSFGGLVNFNAETIGIGGAFIRQ

SEQ ID NO: 450 - protein, 108 aa, Bradyzhizobium species
MSKLQGTYVNDNIGAKLVIAQANDSNGQITSATISYNGHNYPATGHYHFKNSTGPTTVAVLTGLDDDTGYVALSLTSDSQEFKRLKSFGGLANFDAETIGLGGAFIRQ

SEQ ID NO: 451 - protein, 61 aa, Unknown
  Spicies not identified
GSRIMPRLQGTYVNDNIGAKLVISQANDANGQITAASISYNGHNYPATGHYTSRTALAQPR

SEQ ID NO: 452 - protein, 111 aa, Unknown
  Spicies not identified
MSTINGVYRHEPSDTTLTLVEGDDRTGSFTGTLSVSGTDYPIAFGNFHFRHGFSTGPVAISFNTLTADGTAQAWVMFSPDQAYTRLRALGSAADMMGNIGLNGLEFIRQNR

SEQ ID NO: 453 - protein, 336 aa, Burkholderia ambifaria
MSNASLEQAQINLTLAYIVNYSATDYTSGKQIPNPTAAQVSQNIRNGLSNSKMTQDKQFSIVWGPAVLRDADSDGYAANITVVLKSNVTDQYSVVTSGTDFQSPQDILEDNLYETLVSFQKYVPSCHSTAGISVGTDIGLSSVILTTDANGVMLVDFLKTVRASSTINVIGHSLGGALASGLVLYLKNARYLQAQTFKYTCQTFAAPTAGNDIFAGYFDEQMKANAIRVWNTCDIVPMAWNADTIGAVKTIYGSVAPPSDVIKVLIDAIIVTAAPLNYRQWGNNGSQQMKLDGNVVGNITDFFMQAGFQHILGYIFLLGLGLGDIHMPPPPNTQEK

SEQ ID NO: 454 - protein, 336 aa, Burkholderia ambifaria
MSNASLEQAQINLTLAYIVNYSATDYTSGKQIPNPTAAQVSQNIRNGLSNSKMTQDKQFSIVWGPAVLRDADSDGDAANITVVLKSNVTDQYSVVTSGTDFQSPQDILEDNLYETLVSFQKYVPSCHSTAGISVGTDIGLSSVILTTDANGVMLVDFLKTVRPSSTINVIGHSLGGALASGLVLYLKNARYLQAQTFKYTCQTFAAPTAGNDIFAGYFDEQMKANAIRVWNTCDIVPMAWNADTIGAVKTVYKSVAPPSDAIKVLIDAIIVTAAPLNYRQWGNNGSQQMKLDGNVVGNIADFFMQAGFQHILGYIFLLGLGLGDIHMPPPPNTQEK

SEQ ID NO: 455 - protein, 336 aa, Burkholderia diffusa
MSNASLEQAQINLTLAYIVNYSATDYTSGKQIPNPTAAQVSQNIRNGLSNSKMTQDKQFSIVWGPAVLRDADSDGYAANITVVLKSNVTDQYSVVTSGTDFQSPQDILEDNLYETLVSFQKYVPSCHSTAGISVGTDIGLSSVILTTDANGFMLVDFLKTVRPSSTINVIGHSLGGALASGLVLYLKNARYLQAQTFKYTCQTFAAPTAGNDIFAGYFDEQMKANAIRVWNTCDIVPMAWNADTIGAVKTVYKSVAPPSDAIKVLIDAIIVTAAPLNYRQWGNNGSQQMKLVGNVVGNITDFFMQAGFQHILGYIFLLGLGLGDIHMPPPPNTQEK

SEQ ID NO: 456 - protein, 336 aa, Burkholderia ambifaria
MSNASLEQAQINLTLAYIVNYSATDYTSGKQIPNPTAAQVSQNIRNGLSYSKMTQDKQFSIVWGPAVLRDADSDGYAANITVVLKSNVTDQYSVVTSGTDFQSPQDILEDNLYETLVSFQKYVPSCHSTAGISVGTDIGLSSVILTTDANGVMLVDFLKTVRASSTINVIGHSLGGALASGLVLYLKNARYLQAQTFKYTCQTFAAPTAGNDIFAGYFDEQMKANAIRVWNTCDIVPMAWNADTIGAVKTVYKSVAPPSDVIKVLIDAIIVTATPLNYRQWGSYGSQQMKLDGTVVGNITDFFMQAGFQHILGYIFLLGLGLGDIYMPPPPNTQEQ

SEQ ID NO: 457 - protein, 336 aa, Burkholderia latens
MPNASLEQAQTNLTLAYIVNYSATDYSSGKEIRNPTAAQVSQNIRNGLSYSRMTQNKQFNIVWGPAVLRDPDPDGYAANITVVLKSAVTGQYSVVTSGTDFQSPADLLEDNLYETLVSFQKYVPSCNASAGISAGTDIGLSSVILTTDSNGVTLVDFLKTVPASSTISVVGHSLGGALASALVLYLKNQRHLQALTLKYTCETFAAPTAGNDLFAGYFDAQMKTDAVRVWNTCDIVPMAWNTNTIDAVKTVYGSVAPPSDAIKVLIDAIMLTSAPLNYRQWGNYGSVQNKLDGTVVGNITDFFEQAGFQHILGYIFLLGLGLGDIHMPPPPPTANN

SEQ ID NO: 458 - protein, 335 aa, Unknown
  Spicies not identified
MSNTGTEQAQINLTLAYVVNNSATDFFTGKAIKDPTVEQVSQAISNGLNLSKMTKNNQFSIAWGPAVLRDPDSDQYAAHITVVLQSVATGEYSVVTSGTDFASPVDLLEDNLYKTLVSFRKYVPSCSDLAGISAGTDIGLSSVILTTDSNGATLVDFLKTVRPSSTINVIGHSLGGALASALVLYLKNARDLQASNLKFTCETFAAPTAGNDIFASYFDEQMGANATRVWNTCDIVPMAWNAKTIQSVKTIYSSSPPSDAIKLLIDAISINSLPLNYNQWGNDGSQQKTLDGQPDNTITDFFLQAGYQHIPQYMLLLGLNLTDIPLPPPPPTQGQ

SEQ ID NO: 459 - protein, 335 aa, Burkholderia stabilis
MSNTGTEQAQINLTLAYVVNNSATDFFSGKPIKDPTVEQVSQAISNGLNLSKMTKNNQFSIAWGPAVLRDPDSDQYAANITVVLQSAATSEYSVVTSGTDFASPVDLLEDNLYKTLVSFRKYVPSCSDLAGISAGTDIGLSSVILTTDSNGATLVDFLKTVRPSSTINVIGHSLGGALASALVLYLKNARDLQASNLKFTCETFAAPTAGNDIFASYFDEQMGANATRVWNTCDIVPMAWNAKTIQSVKTIYSSSPPSDAIKLLIDAISINSLPLNYNQWGNDGSQQKTLDGQPDNTITDFFLQAGYQHIPQYMLLLGLNLTDIPLPPPPPTQGQ

SEQ ID NO: 460 - protein, 243 aa, Burkholderia ambifaria
MVTSGTDFNSPEDILEDNLYETLVSFQKYVPSCHSTAGISAGTDIGLSSVILTADSNGVTLVDFLKTVPASSTINVIGHSLGGALASALVLYLKNERDLQTQTLKYTCQTFAAPTAGNDIFAGYFDEQMKANAIRVWNTCDIVPMAWNAYTIDAVKTVYGSVAPPNDVIKVLIDGIIVTAAPLNYRQWGNYGSQQIKLDGTVVGNITDFFMQAGFQHILGYIFLLGLGLGDIYMPPPPNTQEK

SEQ ID NO: 461 - protein, 243 aa, Burkholderia ambifaria
MVTSGTDFNSPEDILEDNLYETLVSFQKYVPSCHSTAGISAGTDIGLSSVILTADSNGVTLVDFLKTVPASSTINVIGHSLGGALASALVLYLKNERDLQTQTLKYTCQTFAAPTAGNDIFAGYFDEQMKANAIRVWNTCDIVPMAWNAYTIDAVKTIYGSVAPPSDAIKVLIDAIIVTAAPLNYRQWGNYGSQQIKLDGTPVGNITDFFMQAGFQHIFGYILLLGLGFGDIYMPPPPNTQEM

SEQ ID NO: 462 - protein, 346 aa, Burkholderia ambifaria
MTSSRLEQMQANLTLAYVLNNAAVDGVGRELKHPTASQVKKIIVDRLNRSKMTRNDRFEIAWGPAIVLDPNGEAANVTVVLQLAGSGEYTVVTSGTNFTSPLDVLSDFSYDTLEPFSAYVPNCPSDARISAGTNGALYHVLKTPDESHQTLVQFLSTVPPSSIVNVVGHSLGGALASAIVLYLKNQSGLQSLTYHCQTFAAPTAGNDVFAGYFDEQMRGNAVRIFTTRDIVPMAWNADSLQKVKHVYSDVPYHDTPDNVKVAVDMVSIATNSLKYTQWGTSEPSGPVATAMEYQLKADVNVAILDFQAQVGFQHIDGYIACLGMARSDIDLPPLPQVNPKVGKTPV

SEQ ID NO: 463 - protein, 346 aa, Burkholderia species
MTSSRLEQMQANLTLAYVLNNAAVDGVGRELKHPTASQVKKIIVDRLNRSKMTRNDRFEIAWGPAIVSDPNGEAANVTVVLQLAGSGEYTVVTSGTNFTSPLDVLSDFSYDTLEPFSAYVPNCPSDARISAGTNGALYHVLKTPDESHQTLVQFLSTVPPSSVVNVVGHSLGGALASAIVLYLKNQSGLQSLTYHCQTFAAPTAGNDMFADYFDEQMRGNAVRIFTTRDIVPMAWNADSLQKVKHVYSDVPYHDTPDNVKIAVDMVSIATNSLKYTQWGTSEPSGPVATAMEYQLKADVNVAILDFQAQVGFQHIDGYIACLGMARSDIDLPPLPQVNPKVGKTPV

SEQ ID NO: 464 - protein, 346 aa, Unknown
  Spicies not identified
MTSSRLEQMQANLTLAYVLNNAATDRVGRQIKHPTASQVKKIIVDRLNGSKMTRNDRFEIAWGPAIVLDPNGEAANVTVVLQLAGADEYTVVTSGTNFASPLDVLSDFSYDTLEPFSAYVPSCPSDARISAGTNGALYEVLKTPDESHQTLVQFLSTVPPSSVVNVVGHSLGGALASAIVLYLKNQSGLQSLTYHCQTFAAPTAGNDVFAGYFDEQMRGNAVRIFTTRDIVPMAWNADSLQEVKKVYSDVPHHDTPENVKVAVDLLSVATASLKYKQWGTSDPSGPVATAMEYQLDADVNKAILNFQAQVGYQHIDGYIACLGMARSDIDIPPPAQVNPKVGKTPV

SEQ ID NO: 465 - protein, 346 aa, Burkholderia ambifaria
MTSSRLEQMQANLTLAYVLNNAAVDGVGRELKHPTASQVKKIIVDRLNRSKMTRNDRFEIAWGPAIVVDPNGEAANVTVVVQLAGSGEYTVVTSGTNFTSPLDVLSDFSYDTLEPFSAYVPNCPSDARISAGTNGALYHVLKTPDESHQTLVQFLSTVPPSSIVNVVGHSLGGALASAIVLYLKNQTGLQSLTYHCQTFAAPTAGNEVFADYFDEQMRGNAVRIFTTRDIVPMAWNADSLQKVKHVYSDVPPHDTPDNVKIAVDMVSIATNSLKYTQWGTSEPSGPVATAMEYPLKADVNKAILDFQAQVGYQHIDGYIACLGMARSDIDLPPLPQVNPKVGKTPV

SEQ ID NO: 466 - protein, 346 aa, Burkholderia lata
MTSSRLEQMQANLTLAYVLNNAAVDGVGRELKHPTASQVKKIIVDRLNRSKMTRNDRFEIAWGPAIVLDPNGEAANVTVVLQLAGSGEYTVVTSGTNFTSPLDVLSDFSYDTLEPFSAYVPNCPSDARISAGTNGALYHVLKTPDESHQTLVQFLSTVPPSSIVNVVGHSLGGALASAIVLYLKNQTGLQSLTYHCQTFAAPTAGNKVFADYFDEQMRGNAVRIFTTRDIVPMAWNADSLQKVKHVYSDVPPHDTPDNVQIAVDMVSIATNSLKYTQWGTSEPSGPVATAMEYPLKADVNKAILDFQAQVGFQHIDGYIACLGMARSDIDLPPLPQVNPKVGKTPV

SEQ ID NO: 467 - protein, 346 aa, Burkholderia cenocepacia
MTSSRLEQMQANLTLAYVLNNAAVDGVGRELKHPTASQVKKIIVDRLNRSKMTRDDRFEIAWGPAIVLDPNGEAANVTVVVQLAGAGEYTVVTSGTNFASPLDVLSDFSYDTLEPFSAYVPNCPSDARISAGTNGALYQVLKTPDESHQTLVQFLSTVPPSSVVNVVGHSLGGALASAIVLYLKNQSGLQSLTYHCQTFAAPTAGNDVFAGYFDDQMRGNAVRIFTTRDIVPMAWNADSLQKVKHVYSDVPHHDTPENVKVAVDLLSVATASLKYTQWGTSEPSGPVATAMEYQLKADVNVAILDFQAQVGYQHIDGYIACLGMARGDIDLPPPPQVNPKVGKTPV

SEQ ID NO: 468 - protein, 346 aa, Burkholderia ambifaria
MTSSRLEQMQANLTLAYVLNNAAVDGVGRELKHPTASQVKKIIVDRLNRSKMTRNDRFEIAWGPAIVLDPNGEAANVTVVVQLAGSGEYTVVTSGTNFTSPLDVLSDFSYDTLEPFSAYVPNCPSDARISAGTNGALYHVLKTPDESHQTLVQFLSTVPPSSIVNVVGHSLGGALASAIVLYLKNQTGLQSLTYHCQTFAAPTAGNDVFAGYFDEQMRGNAVRIFTTRDIVPMAWNADSLQKVKHVYSDVPYHDTPDNVKIAVDMVSIATNSLNYTQWGTSEPSGPVATAMEYQLKADVNIAILDFQAQVGFQHIDGYIACLGMARSDIDLPPLPQVNPKVGKTPV

SEQ ID NO: 469 - protein, 346 aa, Burkholderia ambifaria
MTSSRLEQMQANLTLAYVLNNAAVDGVGRELKHPTASQVKKIIVDRLKRSKMTRNDRFEIAWGPAIVLDPNGEAANVTVVLQLAGSGEYTVVTSGTNFTSPLDVLSDFSYDTLEPFSAYVPNCPSDARISAGTNGALYHVLKTPDESHQTLVQFLSTVPPSSIVNVVGHSLGGALASAIVLYLKNQTGLQSLTYHCQTFAAPTAGNDVFAGYFDEQMRGNAVRIFTTRDIVPMAWNAESLQKVKHVYSDVPPHDTPDNVKIAVDMVSIATNSLKYTQWGTSEPSGPVATAMEYPLKADVNKAILDFQAQVGYQHIDGYIACLGMARSDIDLPPLPQVNPKVGKTPV

SEQ ID NO: 470 - protein, 346 aa, Burkholderia ambifaria
MTSSRLEQMQANLTLAYVLNNAAVDGVGRELNHPTASQVKKIIVDRLNRSKMTRNDRFEIAWGPAIVLDPNGEAANVTVVLQLAGSGEYTVVTSGTNFTSPLDVLSDFSYDTLEPFSAYVPNCPSDARISAGTNGALYHVLKTPDESHQTLVQFLSTVPPSSIVNVVGHSLGGALASAIVLYLKNQSGLQSLTYHCQTFAAPTAGNKVFADYFDEQMRGNAVRIFTTRDIVPMAWNADSLQKVKHVYSDVPYHDTPDNVKIAVDMVSIATNSLKYTQWGTSEPSGPVATAMEYQLKADVNVAILDFQAQVGFQHIDGYIACLGMARSDIDLPPLPQVNPKVGKTPV

SEQ ID NO: 471 - protein, 346 aa, Burkholderia ambifaria
MTSSRLEQMQANLTLAYVLNNAAVDGVGRELKHPTASQVKKIIVDRLNRSKMTRNDRFEIAWGPAIVSDPNGEAANVTVVVQLAGSGEYTVVTSGTNFTSPLDVLSDFSYDTLEPFSAYVPNCPSDARISAGTNGALYHVLKTPDESHQTLVQFLSTVPPSSIVNVVGHSLGGALASAIVLYLKNQTGLQSLTYHCQTFAAPTAGNEVFADYFDEQMRGNAVRIFTTRDIVPMAWNADSLQKVKHVYSDVPYHDTPDNVKVAVDMVSIATKSLNYTQWGTSEPSGPVAAAMEYPLKADVNVAILDFQAQVGFQHIDGYIACLGMARSDIDLPPLPQVNPKVGKTPV

SEQ ID NO: 472 - protein, 346 aa, Burkholderia ambifaria
MTSSRLEQMQANLTLAYVLNNAAVDGAGRELKHPTASQVKKIIVDRLNRSKMTRNDRFEIAWGPAIVSDPNGEAANVTVVLQLAGTGEYTVVTSGTNFASPLDLLSDFSYDTLEPFSAYVPNCPSDARISAGTNGALYHVLKTPDESHQTLVQFLSTVPPSSVVNVVGHSLGGALASAIVLYLKNQNGLQSLTYHCQTFAAPTAGNKVFADYFDEQMRGNAVRIFTTRDIVPMAWNADSLQKVKHVYSDVPYHDTPDNVKIAVDMVSIATNSLKYTQWGTSEPSGPLAAAMEYPLKADVNVAILDFQAQVGFQHIDGYIACLGMARSDIDLPPLPQVNPKVGKTPV

SEQ ID NO: 473 - protein, 310 aa, Burkholderia ambifaria
MTSSRLEQMQANLTLMTRNDRFEIAWGPAIVLDLNGEAANVTVVVQLAGSGEYTVVTSGTNFTSPLDVLSDFSYDTLEPFSAYVPNCPSDARISAGTNGALYHVLKTPDESHQTLVQFLSTVPPSSIVNVVGHSLGGALASAIVLYLKNQSGLQSLTYHCQTFAAPTAGNKVFADYFDEQMRGNAVRIFTTRDIVPMAWNADSLQKVKHVYSDVPYHDTPDNVKVAVDMVSIATNSLKYTQWGTSEPSGPVATAMEYQLKADVNVAILDFQAQVGFQHIDGYIACLGMARSDIDLPPLPQVNPKVGKTPV

SEQ ID NO: 474 - protein, 346 aa, Unknown
  Spicies not identified
MTSSRLEQMQANLTLAYVLNNAAVDGAGRELKHPTASQVKKIIVDRLNRSKMTRNDRFEIAWGPAIVSDPNGEAANVTVVVQLAGSGEYTVVTSGTNFTSPLDVLSDFSYDTLEPFSAYVPNCPSDARISAGTNGALYHVLKTPDESHQTLVQFLSTVPPSSIVNVVGHSLGGALASAIVLYLKNQTGLQSLTYHCQTFAAPTAGNDVFAGYFDEQMRGNAVRIFTTRDIVPMAWNADSLQKVKHVYSDVPYHDTPDNVKVAVDMVSIATKSLNYTQWGTSEPSGPVAAAMEYPLKADVNVAILDFQAQVGFQHIDGYIACLGMARSDIDLPPLPQVNPKVGKTPV

SEQ ID NO: 475 - protein, 346 aa, Unknown
  Spicies not identified
MTSSRLEQMQANLTLAYVLNNAAVDGAGRELKHPTASQVKKIIVDRLNRSKMTRNDRFEIAWGPAIVLDPNGEAANVTVVLQLAGSGEYTVVTSGTNFTSPLDVLSDFSYDTLEPFSAYVPNCPSDARISAGTNGALYHVLKTPDESHQTLVQFLSTVPPSSIVNVVGHSLGGALASAIVLYLKNQSGLQSLTYHCQTFAAPTAGNKVFADYFDEQMRGNAVRIFTTRDIVPMAWNADSLQKVKHVYSDVPPHDTPDNVKIAVDMVSIATNSLKYTQWGTSEPSGPVATAMEYPLKADVNKAILDFQAQVGFQHIDGYIACLGMARSDIDLPPLPQVNPKVGKTPV

SEQ ID NO: 476 - protein, 346 aa, Unknown
  Spicies not identified
MTSSRLEQMQANLTLAYVLNNAAVDGAGRELKHPTASQVKKIIVDRLNRSKMTRNDRFEIAWGPAIVLDPNGEAANVTVVLQLAGSGEYTVVTSGTNFTSPLDVLSDFSYDTLEPFSAYVPNCPSDARISAGTNGALYHVLKTPDESHQTLVQFLSTVPPSSIVNVVGHSLGGALASAIVLYLKNQSGLQSLTYHCQTFAAPTAGNKVFADYFDEQMRGNAVRIFTTRDIVPMAWNADSLQKVKHVYSDVPYHDTPDNVKVAVDMVSIATKSLNYTQWGTSEPSGPVAAAMEYPLKADVNVAILDFQAQVGFQHIDGYIACLGMARSDIDLPPLPQVNPKVGKTPV

SEQ ID NO: 477 - protein, 345 aa, Burkholderia cepacia
MTSSKLGQMQVNLTLAYVLNNAATDKFGHGIPQPTAPQVKKIIVDRLNGSRMTRNDQFQIVWGPAIVSDKTDGYAANITAVLQSTATGEYSVVTSGTNFKSALDLLGDFSFSTLEPFSAYVPDCPPDARISAGTNGALFFVLDTPDSSRVKLADFLRSVPPSSVVNVIGHSLGGALASAIVLYLKHQSGLQAHTYNCQTFAAPTAGNAAFADYFNRQMRDRAVRVFNARDIVPMAWNADTILHVKDVYSDAGLDTPLDTKIAVDAVSLATRPLDYAQWGTSDLSASVTTAMQYRLDGTVNGHIRDFSTQVGYQHIYEYMTCLDMALSDIDIPGPGPGQVASPINR

SEQ ID NO: 478 - protein, 334 aa, Unknown
  Spicies not identified
MLDSLEQRQIHLTHAYVVNNAARDAYSNWQDIKNPQASVVRDNILSRLNASKVGGGYGIVWGPSLVLDDDSNKYAAHITVALMGGKNNEIVIVTSGTNPDSAKDMMDDITIFPMVPLHKIVSGAPVSAGISQGTDWGVEAILNAPSSSASQGTLSDFIAKLQNGATVTLVGHSLGGALMSVIALYLKNKFQNIEFNCETFAAPTAGDGAFAYYFNQQMAGSALRVFNTLDVVPMGWCATSLDAAMTLYDSKNILIDPDSKKLFCQNIDLIEFNNLNYTQWGMGCAGMELKLPGEVNSDYNKYKSQSGYQHIYAYMSLLGLQLTDIPMPPPSAGS

SEQ ID NO: 479 - protein, 346 aa, Unknown
  Spicies not identified
MTSSRLEQMQANLTLAYVLNNAAVDGAGRELKHPTASQVKKIIVDRLNRSKMTRNDRFEIAWGPAIVLDPNGEAANVTVVVQLAGSGEYTVVTSGTNFTSPLDVLSDFSYDTLEPFSAYVPNCPSDARISAGTNGALYHVLKTPDESHQTLVQFLSTVPPSSIVNVVGHSLGGALASAIVLYLKNQSGLQSLTYHCQTFAAPTAGNKVFADYFDEQMRGNAVRIFTTRDIVPMAWNADSLQKVKHVYSDVPPHDTPDNVKIAVDMVSIATNSLKYTQWGTSEPSGPVATAMEYPLKADVNKAILDFQAQVGYQHIDGYIACLGMARSDIDLPPLPQVNPKVGKTPV

SEQ ID NO: 480 - protein, 344 aa, Burkholderia territorii
MTSSKLGQMQVNLTLAYVLNNAATDKFGHGIQHPTAPQVKKIIVDRLNGSRMTRNDQFAIVWGPAIVSDRNGYAANITAVLQSTATGEYSVVTSGTNFESPLDLMGDFSFGTLEPFSAYVRDCPSDAHISAGTNGALFYVLDTPDSSRVKLADFLRTVQPSSVVNVIGHSLGGALASAIVLYLKNQNGLQAHTYNCQTFAGPTAGNAAFADYFNQQMRDRAVRVFNSRDIVPMAWNADTILQVKDVYSDAGLDTPLDTKIAVDAVSAATRPLDYAQWGTADLSASVTTPMQYRLDGTVNGHIRDFHTQVGYQHIYEYMTCLDMALSDIDIPGPGPGQVASPVIR

SEQ ID NO: 481 - protein, 344 aa, Burkholderia territorii
MTSSKLGQMQVNLTLAYVLNNAATDKFGHGIQHPTAPQVKKIIVDRLNGSRMTRNDQFAIVWGPAIVSDRNGYAANITAVLQSTATGEYSVVTSGTNFESPLDLMGDFSFGTLEPFSAYVRDCPSDARISAGTNGALFYVLDTPDSSRVKLADFLRTVQPSSVVNVIGHSLGGALASAIVLYLKNQNGLQAHTYNCQTFAGPTAGNAAFADYFNQQMRDRAVRVFNSRDIVPMAWNADTILQVKDVYSDAGLDTPLDTKIAVDAVSAATRPLDYAQWGTADLSASVTTPMQYRLDGTVNGHIRDFHTQVGYQHIYEYMTCLDMALSDIDIPGPGPGQVASPIVR

SEQ ID NO: 482 - protein, 344 aa, Burkholderia territorii
MTSSKLGQMQVNLTLAYVLNNAATDKFGHGIQHPTASQVKKIIVDRLNGSRMTRNDQFAIVWGPAIVSDRNGYAANITAVLQSTATGEYSVVTSGTNFESPLDLMGDFSFGTLEPFSAYVRDCPSDARISAGTNGALFYVLDTPDSSRVKLADFLRTVQPSSVVNVIGHSLGGALASAIVLYLKNQNGLQAHTYNCQTFAGPTAGNAAFADYFNQQMRDRAVRVFNSRDIVPMAWNADTILQVKDVYSDAGLDTPLDAKIAVDAVSAATRPLDYAQWGTADLSASVTTPMQYRLDGTVNGHIRDFHTQVGYQHIYEYMTCLDMVLSDIDIPGPGPGQLASPIVR

SEQ ID NO: 483 - protein, 344 aa, Burkholderia territorii
MTSSKLGQMQVNLTLAYVLNNAATDKFGHGIQHPTAPQVKKIIVDRLNGSRMTRNDQFAIVWGPAIVSDRNGYAANITAVLQSTATGEYSVVTSGTNFESPLDLMGDFSFGTLEPFSAYVRDCPSDARISAGTNGALFYVLDTPDSSRVKLADFLRTVQPSSVVNVIGHSLGGALASAIVLYLKNQNGLQAYTYNCQTFAGPTAGNAAFADYFNQQMRDRAVRVFNSRDIVPMAWNADTILQVKDVYSDAGLDTPLDAKIAVDAVSAATRPLDYAQWGTADLSASVTTPMQYRLDGTVNGHIRDFHTQVGYQHIYEYMTCLDMALSDIDIPGPGPGQVASPIVR

SEQ ID NO: 484 - protein, 344 aa, Burkholderia territorii
MTSSKLGQMQVNLTLAYVLNNAATDKFGHGIQHPTAPQVKKIIVDRLNGSRMTRNDQFAIVWGPAIVSDRNGYAANITAVLQSTATGEYSVVTSGTNFESPLDLMGDFSFGTLEPFSAYVRDCPSDARISAGTNGALFYVLDTPDSSRVKLADFLRTVQPSSVVNVIGHSLGGALASAIVLYLKNQNGLQAHTYNCQTFAGPTAGNAAFADYFNQQMRDRAVRVFNSRDIVPMAWNADTILQVKDVYSDAGLDTPLDTKIAVDAVSAATRPLDYAQWGTADLSASVTTPMQYRLDGTVNGHIRDFRTQVGYQHIYEYMTCLDMALSDIDIPGPGPGQVASPIVR

SEQ ID NO: 485 - protein, 344 aa, Burkholderia territorii
MTSSKLGQMQVNLTLAYVLNNAATDKFGHGIQHPTAPQVKKIIVDRLNGSRMTRNDQFAIVWGPAIVSDRNGYAANITAVLQSTATGEYSVVTSGTNFESPLDLMGDFSFGTLEPFSAYVRDCPSDARISAGTNGALFYVLDTPDSSRVKLADFLRTVQPSSVVNVIGHSLGGALASAIVLYLKNQNGLQAHTYNCQTFAGPTAGNAAFADYFNQQMRDRAVRVFNSRDIVPMAWNADTILQVKDVYSDAGLDTPLDTKIAVDAVSAATRPLAYAQWGTADLSASVTTPMQYRLDGTVNGHIRDFHTQVGYQHIYEYMTCLDMALSDIDIPGPGPGQVASPIVR

SEQ ID NO: 486 - protein, 344 aa, Burkholderia territorii
MTSSKLGQMQVNLTLAYVLNNAATDKFGHGIQHPTAPQVKKIIVDRLNGSRMTRNDQFAIVWGPAIVSDRNGYAANVTAVLQSTATGEYSVVTSGTNFESPLDLMGDFSFGTLEPFSAYVRDCPSDARISAGTNGALFYVLDTPDASRVKLADFLRTVQPSSVVNVIGHSLGGALASAIVLYLKNQNGLQAHTYNCQTFAGPTAGNAAFADYFNQQMRDRAVRVFNSRDIVPMAWNADTILQVKDVYSDAGLDTPLDTKIAVDAVSAATRPLDYAQWGTADLSASVTTPMQYRLDGTVNGHIRDFHTQVGYQHVYEYMTCLDMALSDIDIPGPGPGQVASPIVR

SEQ ID NO: 487 - protein, 344 aa, Burkholderia territorii
MTSSKLGQMQVNLTLAYVLNNAATDKFGHGIQHPTAPQVKKIIVDRLNGSRMTRNDQFAIVWGPAIVLDRNGYAANITAVLQSTATGEYSVVTSGTNFESPLDLMGDFSFGTLEPFSAYVRDCPSDARISAGTNGALFYVLDTPDSSRTKLADFLRTVQPSSVVNVIGHSLGGALASAIVLYLKNQSGLQAHTYNCQTFAGPTAGNAAFADYFNQQMRDRAVRVFNSRDIVPMAWNADTILHVKDVYSDAGLDTPLDTKIAVDAVSAATRPLAYAQWGAADLSASVTTPMQYRLDGTVNGHIRDFHTQVGYQHIYEYMTCLDMALSDIDIPGPGPGQVASPIVR

SEQ ID NO: 488 - protein, 344 aa, Burkholderia territorii
MTSSKLGQMQVNLTLAYVLNNAATDKFGHGIQHPTAPQVKKIIVDRLNGSRMTRNDQFAIVWGPAIVSDRNGYAANITAMLQSTATGEYSVVTSGTNFESPLDLMGDFSFGTLEPFSAYVRDCPSDARISAGTNGALFYVLDTPDSSRVKLADFLRTVQPSSVVNVIGHSLGGALASAIVLYLKNQNGLHAHTYNCQTFAGPTAGNAAFADYFNQQMRDRAVRVFNSRDIVPMAWNADTILQVKDVYSDAGLDTPLDTKIAVDAVSAATRPLDYAQWGTADLSASVTTPMQYRLDGTVNGHIRDFHTQVGYQHIYEYMTCLDMALSDIDIPGPGPGQVASPIVR

SEQ ID NO: 489 - protein, 330 aa, Pseudomonas chlororaphis
MTSLDSLQQRQISLTHAFVVNNAARYSPTWENIKNPSPSQVKDNILSRLNGSKVGGGYGVAWGPALVMDGDYTAHITVVLIGGKNENDIVVVTSGTLLNSPLDQLDDLDIFPMVPLQKLIKSCPVPANISQGTEGGVHAILHTASKIGSQGTLCDFLGKQRSGATIRLVGHSLGGALMSVVALYLKDKFSGFNFYCETIAAPTAGDGFFASYFNKQMAGNALRIYNTLDAIPMAWCATSLDFSLTLYEPTNVIDEDTKKAVCRGIDTVTNNNLNYTQWGMGSAQMELRLCGKLQSSCTSYKAQSGYQHIYEYISLLGLQPGDIPMPPFGS

SEQ ID NO: 490 - protein, 345 aa, Unknown
  Spicies not identified
MTSSKLGQMQVNLTLAYVLNNAATDKFGHGIPQPTAPQVKKIIVDRLNGSRMTRNDQFQIVWGPAIVSDKTDGYAANITAVLQSTATGEYSVVTSGTNFKSALDLLGDFSFSTLEPFSAYVPDCPPDARISAGTNGALFFILDTPDSSRVKLADFLRSVPPSSVVNVIGHSLGGALASAIVLYLKHQSGLQAHTYNCQTFAAPTAGNAAFADYFNRQMRDRAVRVFNARDIVPMAWNADTILHVKDVYSDAGLDTPLDTKIAVDAVSLATRPLDYAQWGTSDLSASVTTAMQYRLDGTVNGHIRDFSTQVGYQHIYEYMTCLDMALSDIDIPGPGPGQVASPINR

SEQ ID NO: 491 - protein, 345 aa, Unknown
  Spicies not identified
MTSSKLGQMQVNLTLAYVLNNAATDKFGHGIPQPTAPQVKKIIVDRLNGSRMTRNDQFQIVWGPAIVYDKTDGYAANITAVLQSTATGEYSVVTSGTNFKSALDLLGDFSFSTLEPFSAYVPDCPPDARISAGTNGALFFVLDTPDSSRVKLADFLRSVPPTSVVNVIGHSLGGALASAIVLYLKHQSGLQAHTYNCQTFAAPTAGNAAFADYFNRQMRDRAVRVFNARDIVPMAWNADTILHVKDVYSDAGLDTPLDTKIAVDAVSLATRPLDYAQWGTSDLSASVTTAMQYRLDGTVNGHIRDFSTQVGYQHIYEYMTCLDMALSDIDIPGPGPGQVASPINR

SEQ ID NO: 492 - protein, 344 aa, Unknown
  Spicies not identified
MTSSKLGQMQVNLTLAYVLNNAATDKFGHGIQHPTAPQVKKIIVDRLNGSRMTRNDQFAIVWGPAIVSDRNGYAANVTAVLQSTATGEYSVVTSGTNFESPLDLMGDFSFGTLEPFSAYVRDCPSDARISAGTNGALFYVLDTPDSSRVKLADFLRTVQPSSVVNVIGHSLGGALASAIVLYLKNQNGLQAHTYNCQTFAGPTAGNAAFADYFNQQMRDRAVRVFNSRDIVPMAWNADTILQVKDVYSDAGLDTPLDAKIAVDAVSAATRPLDYAQWGTADLSASVTTPMQYRLDGTVNGHIRDFHTQVGYQHIYEYMTCLDMALSDIDIPGPGPGQVASPIVR

SEQ ID NO: 493 - protein, 344 aa, Unknown
  Spicies not identified
MTSSKLGQMQVNLTLAYVLNNAATDKFGHGIQHPTAPQVKKIIVDRLNGSRMTRNDQFAIVWGPAIVSDRNGYAANITAVLQSTATGEYSVVTSGTNFESPLDLMGDFSFGTLEPFSAYVRDCPSDARISAGTNGALFYVLDTPDSSRVKLADFLRTVQPSSVVNVIGHSLGGALASAIVLYLKNQNGLQAHTYNCQTFAGPTAGNAAFADYFNQQMRDRAVRVFNSRDIVPMAWNADTILQVKDVYSDAGLDTPLDTKIAVDAVSAATRPLAYAQWGAADLSASVTTPMQYRLDGTVNGHIRDFHTQVGYQHIYEYMTCLDMALSDIDIPGPGPGQVASPIVR

SEQ ID NO: 494 - protein, 344 aa, Unknown
  Spicies not identified
MTSSKLGQMQVNLTLAYVLNNAATDKFGHGIQHPTAPQVKKIIVDRLNGSRMTRNDQFAIVWGPAIVSDRNGYAANITAVLQSTATGEYSVVTSGTNFESPLDLMGDFSFGTLEPFSAYVRDCPSDARISAGTNGALFYVLDTPDSSRVKLADFLRTVQPSSVVNVIGHSLGGALASAIVLYLKNQNGLHAHTYNCQTFAGPTAGNAAFADYFNQQMRDRAVRVFNSRDIVPMAWNADTILQVKDVYSDAGLDTPLDTKIAVDAVSAATRPLDYAQWGTADLSASVTTPMQYRLDGTVNGHIRDFHTQVGYQHIYEYMTCLDMALSDIDIPGPGPGQVASPIVR

SEQ ID NO: 495 - protein, 344 aa, Unknown
  Spicies not identified
MTSSKLGQMQVNLTLAYVLNNAATDKFGHGIQHPTAPQVKKIIVDRLNGSRMTRNDQFAIVWGPAIVSDRNGYAANITAVLQSTATGEYSVVTSGTNFESPLDLMGDFSFGTLEPFSAYVRDCPSDARISAGTNGALFYVLDTPDSSRVKLADFLRTVQPSSVVNVIGHSLAGALASAIVLYLKNQNGLQAHTYNCQTFAGPTAGNAAFADYFNQQMRDRAVRVFNSRDIVPMAWNADTILQVKDVYSDAGLDTPLDTKIAVDAVSAATRPLDYAQWGTADLSASVTTPMQYRLDGTVNGHIRDFHTQVGYQHIYEYMTCLDMALSDIDIPGPGPGQVASPIVR

SEQ ID NO: 496 - protein, 339 aa, Ralstonia solanacearum
MASPNSLSQIQTNLTLAYILNNAAKDSSWNDVKNPSPSQIRDNILSRSTASKMTAGRFAIAWGPAVVVGDDGYAANITAVMLGESGRDFRIVTSGTNFDSNLDFLEDNLIFPMVPLQNRIPACPASAKIAAGTDLGLQKIIETPSSTGSNTKLTDFLAKLPENSTIGVIGHSLGGALASTLVLYLKSTLPDMNFYCQTFAGPTAGNGAFAYYFNEVMVGNALRVYNTLDIVPFGWSATSLDLAFSIYPAPNGITEDFAKKIKYSIDSVEQNNLDYTQWGLGNPTMQNRLSGLINSDIQGFELQMGYQHIYEYITLLGLQFSDIKMPPPVNAQAAAILAT

SEQ ID NO: 497 - protein, 330 aa, Unknown
  Spicies not identified
MTSLDSLQQRQISLTHAFVVNNAARYSPSWKNIKNPSPSQVKDNILSRLNGSKVGGGYGVAWGPALVMDGEYTAHITVVLIGGRNENDIVVVTSGTLLDSPLDQLDDLDIFPMVPLQKLIKSCPVPANISQGTAGGVHAILHTASKIGSQGTLCDFLGKQRSGATIRLVGHSLGGALMSVVALYLKDKFSGFNFYCETIAAPTAGDGFFASYFNKQMAGNALRIYNTLDVVPMAWCATSLDFSLTLYEPTNVIDEDTKKAVCRGIDTVTNNNLNYTQWGMGSAQMELRLCGKLQSSCTSYKAQSGYQHIYEYISLLGLQPGDIPMPPFGS

SEQ ID NO: 498 - protein, 330 aa, Unknown
  Spicies not identified
MTSLDSLQQRQISLTHAFVVNNAARYSPSWENIKNPSPSQVKDNILSRLNGSKVGGGYGVAWGPALVMDGDYTAHITVVLIGGKNENDIVVVTSGTLLNSPLDQLDDVDIFPMVPLQKLIKSCPVPANISQGTEGGVHAILNTASKIGSQGTLCDFLGKQRSGATIRLVGHSLGGALMSVIALYLKDKFSGFNFYCETIAAPTAGDGFFASYFNKQMAGNALRIYNTLDVIPMAWCATSLDFSLTLYEPTNVIDDDTKKAVYLGIDIVTNNNLNYTQWGMGSAQMELRLCGKLQSSCTSYKAQSGYQHIYEYISLLGLQPGDIPMPPFGS

SEQ ID NO: 499 - protein, 346 aa, Unknown; identical to SEQ ID NO: 465
  Spicies not identified

SEQ ID NO: 500 - protein, 331 aa, Pseudomonas chlororaphis
MTSLDSIQQRQISLTHAYVVNNSARYSPSWKDIKNPSPHQVKDNILSRLNGSKIGGGYAVVWGPALAMDGDYAAHITVVLIGGKSGNDIVVVTSGTLGDSLQDQVDDLDIFPMVPLQELIKSCPVPASISPGTALGVQKILNTPSTIGVQGTLCDFLGKQRSGATIRLVGHSLGGALMSVLALYLKEKLSGFNFYCETIAAPTAGDGFFASYFNKQMAGNALRIYNTLDVVPMAWCATSLDFSLTLYEPTNVIDNGTKEMVCLAIDTVTNNNLNYTQWGMGSSNMELRLCGELQSKCASYQAQSSYQHIYEYMSLLGLQLGDIPMPPPFGS

SEQ ID NO: 501 - protein, 331 aa, Pseudomonas chlororaphis
MTSLDSIQQRQISLTHAYVVNNSARYSPSWQNIKKPSPSQVKDNILSRLNGSKVGGGYAVVWGPALAMDGDYAAHITVVLIGGKSGNDIVVVTSGTLDGSPMDQFDDLDIFPMVPLQNLIKSCPVPAKLSPGTLAGVNKILSTPSTIGFQGTLSDFLGKQRSGATIRLVGHSLGGALMSVVALYLKEKFSGFNFYCETIAAPTAGDGFFASYFNKQMAGNALRIYNTLDVIPMAWCATSLDFSLTLYEPTNVIDNGTKEMVCLAIDTVTNNNLNYTQWGMGSSNMELRLCGELQSKCTTYQAQSGYQHIYEYISLLGLQLGDIPMPPPFGS

SEQ ID NO: 502 - protein, 325 aa, Unknown; identical to SEQ ID NO: 402
  Spicies not identified

SEQ ID NO: 503 - protein, 331 aa, Unknown
  Spicies not identified
MTSLDSLQQRQINLTHAYVVNNAALSSPDWKNIKNPSPHQVKDNILTRLNGSKIGGGYGVAWGPALVPDGEHVAHITVVLIGGQNENDIVVVTSGTLADSIKDQIDDLDISPMVPLQNLIKNCPVPAHVAQGTLDGVNAILGQESTIGSQGKLCDFLAKQRSGATIRLVGHSLGGALMSVLALYLKDKFSNFDFHCETIAAPTAGDGVFASYFNQQMAGNALRIYNTLDVVPMAWCATSLDFSLTLYEPTNVIDEKMKGMVCSNIDTITRNNLNYTQWGMGGANMELRLCGELQSPCPNYEAQSGYQHIYEYMTLLGLQLGDIPMPAPSGS

SEQ ID NO: 504 - protein, 330 aa, Unknown
  Spicies not identified
MTSLDSLQQRQISLTHAFVVNNAARYSPSWKNIKNPSPSQVKDNILSRLNGSKVGGGYGVAWGPALVMDGEYTAHITVVLIGGRNENDIVVVTSGTLLNSPLDQLDDLDIFPMVPLQKLIKSCPVPANISQGTAGGVHAILHTASKIGSQGTLCDFLGKQRSGATIRLVGHSLGGALMSVVALYLKDKFSGFNFYCETIAAPTAGDGFFASYFNKQMAGNALRIYNTLDVVPMAWCATSLDFSLTLYEPTNVIDEDTKKAVCRGIDTVTNNNLNYTQWGMGSAQMELRLCGKLQSSCTSYKAQSGYQHIYEYISLLGLQPGDIPMPPFGS

SEQ ID NO: 505 - protein, 330 aa, Unknown
  Spicies not identified
MTSLDSLQQRQISLTHAFVVNNAARYSPTWENIKNPSPSQVKDNILSRLNGSKVGGGYGVAWGPALVMDGDYTAHITVVLIGGKNENDIVVVTSGTLLNSPLDQLDDLDIFPMVPLQKLIKSCPVPANISQGTEGGVHAILHTASKIGSQGTLCDFLGKQRSGATIRLVGHSLGGALMSVVALYLKDKFSGFNFYCETIAAPTAGDGFFASYFNKQMAGNALRIYNTLDAIPMAWCATSLDFSLTLYEPTNVIDEDTKKAVCRGIDTVTNNNLNYTQWGMGSAQMELRLCGKLQSSCTSYKAQSGYQHIYEYMSLLGLQPGDIPMPPFGS

SEQ ID NO: 506 - protein, 331 aa, Unknown
  Spicies not identified
MTSLDSLQQRQINLTHAYVVNNAALSSPDWKNMKNPSPSQVKDNILTRLNGSKVGGGYGVAWGPALVPDGEHVAHITVVLIGGQNENDIVVVTSGTLADSIKDQIDDLDISPMVPLQNLIKNCPVPAHVAQGTADGVNAILGQESKIGSQGKLCDFLAKQRSGATIRLVGHSLGGALMSVLALYLKDKFSNFDFHCETIAAPTAGDGVFASYFNQQMAGNALRIYNTLDVVPMAWCATSLDFSLTLYEPTNVIDEKMKGMVCSNIDTITRNNLNYTQWGMGGANMELRLCGELQSPCPNYEAQSGYQHIYEYMTLLGLQLGDIPMPAPSGS

SEQ ID NO: 507 - protein, 329 aa, Unknown
  Spicies not identified
MTTPDTLLQRQISLTHAFVVNNAALYSQSWENIKNPKPSQVKDNILTRLNGSKVGGGYAVAWGPALVTDGEYTAHITVVLTGGRSGNDIVVVTSGTLKDSLKDLVDDLDIFPMVPLQSVIPGYQGSASIAQGTADGVNAILTTASTIGATGTLCDFLGRQQSGATIRLVGHSLGGALMSVLALYLKDRFPGFNFFCETFAAPTAGDGFFAGYFNKQMAGNALRIYNTLDIVPMAWCATSLDYSLTVYEDDPIDESTRNTVWSRIDKVVNNNLNYTQWGMGSVNMELRLCGKPQSDCTNYKSQSGYQHIYEYMTLLGLQPTDIPMPPFGS

SEQ ID NO: 508 - protein, 330 aa, Unknown
  Spicies not identified
MTSLDSLQQRQISLTHAFVVNNAARYSPTWENIKNPSPSQVKDNILSRLNGSKVGGGYGVAWGPALVMDGDYTAHITVVLIGGKNENDIVVVTSGTLLNSPLDQLDDLDIFPMVPLQKLIKSCPVPANISQGTEGGVHAILNTASKIGSQGTLCDFLGKQRSGATIRLVGHSLGGALMSVIALYLKDKFSGFNFYCETIAAPTAGDGFFASYFNKQMAGNALRIYNTLDVIPMAWCATSLDFSLTLYEPTNVIDDDTKKAVCLGIDIVTNNNLNYTQWGMGSAQMELRLCGKLQSSCTSYKAQSGYQHIYEYISLLGLQPGDIPMPPFGS

SEQ ID NO: 509 - protein, 325 aa, Unknown
  Spicies not identified
MTSLDSLQQRQISLTHAFVVNNAALHSQSWKNMKNPTPSQVTDNILSRLNASKVGGGYGVVWGPALVMDGEHAAHITVVLAGENDIVVVTSGTLKDSLKDQVDDLDIFPMVPLKSVIPGCQVPANIAQGTSKGVNAILTTASTVGSQGTLCDFLGKQQSGATIRLVGHSLGGALMSVVALYLKDKFPGFNLFCETFAAPTAGDGLFASYFNKQMAGNALRIYNTLDVVPMAWCATSLDYSLTLYEDDPKENTRNMVCSCIDKVVNNNLNYTQWGMGSANMELRLCGELQSDCTSYESQSGYQHVYEYMTLLGLQPGDIPMPPFGS

SEQ ID NO: 510 - protein, 330 aa, Unknown
  Spicies not identified
MTSLDSLQQRQISLTHAFVVNNAARYSPTWENIKNPSPSQVKDNILSRLNGSKVGGGYGVAWGPALVMDGDYTAHITVVLIGGKNENDIVVVTSGTLLNSPLDQLDDLDIFPMVPLQKLIKSCPVPANISQGTEGGVHAILHTASKIGSQGTLCDFLGKQRSGATIRLVGHSLGGALMSVVALYLKDKFSGFNFYCETIAAPTAGDGFFASYFNKQMAGNALRIYNTLDAIPMAWCATSLDFSLTLYEPTNVIDDDTKKAVCRGIDTVTNNNLNYTQWGMGSAQMELRLCGKLQSSCTSYKAQSGYQHIYEYMSLLGLQPGDIPMPPFGS

SEQ ID NO: 511 - protein, 330 aa, Unknown
  Spicies not identified
MTSLDSLQQRQISLTHAFVVNNAARYSPTWENIKNPSPSQVKDNILSRLNGSKVGGGYGVAWGPALVMDGDYTAHITVVLIGGKNENDIVVVTSGTLLNSPLDQLDDLDIFPMVPLQKLIKSCPVPANISQGTEGGVHAILHTASKIGSQGTLCDFLGKQRSGATIRLVGHSLGGALMSVIALYLKDKFSGFNFYCETIAAPTAGDGFFASYFNKQMAGNALRIYNTLDAIPMAWCATSLDFSLTLYEPTNVIDEDTKKAVCRGIDTVTNNNLNYTQWGMGSAQMELRLCGKLQSSCTSYKAQSGYQHIYEYMSLLGLQPGDIPMPPFGS

SEQ ID NO: 512 - protein, 330 aa, Unknown
  Spicies not identified
MTSLDSLQQRQISLTHAFVVNNAARYSPSWENIKNPSPSQVKDNILSRLNGSKVGGGYGVAWGPALVMDGEYTAHITVVLIGGRNENDIVVVTSGTLLDSPLDQLDDLDIFPMVPLQKLIKSCPVPANISQGTAGGVHAILHTASKIGSQGTLCDFLGKQRSGATIRLVGHSLGGALMSVVALYLKDKFSGFNFYCETIAAPTAGDGFFASYFNKQMAGNALRIYNTLDVVPMAWCATSLDFSLTLYEPTNVIDEDTKKAVCRGIDTVTNNNLNYTQWGMGSAQMELRLCGKLQSSCTSYKAQSGYQHIYEYISLLGLQPGDIPMPPFGS

SEQ ID NO: 513 - protein, 330 aa, Unknown
  Spicies not identified
MTSLDSLQQRQISLTHAFVVNNAARYSPSWKNIKNPSPSQVKDNILSRLNGSKVGGGYGVAWGPALVMDGEYTAHITVVLIGGRNENDIVVVTSGTLLDSPLDQLDDLDIFPMVPLQKLIKSCPVPANISQGTAGGVHAILHTASKIGSQGTLCDFLGKQRSGATIRLVGHSLGGALMSVVALYLKDKFSGFNFYCETIAAPTAGDGFFASYFNKQMAGNALRIYNTLDVIPMAWCATSLDFSLTLYEPTNVIDEDTKKAVCRGIDTVTNNNLNYTQWGMGSAQMELRLCGKLQSSCTSYKAQSGYQHIYEYISLLGLQPGDIPMPPFGS

SEQ ID NO: 514 - protein, 320 aa, Pseudomonas baetica
TLVQRQISLTHAFVVNNAALQPQSWKNMKNPTPSQVKDNILSRLNASKVGRGYDVAWGPALVMDGEYAAHITVVLTGGGSGNDIVVVTSGTLTDSLKDQVDDLDIFPMVPLQSVIPGCQGSASIAQGTADGVQAILTTASTISPQGTLCDFLGTQQSGANIRLVGHSLGGALMSVLALYLKDKFPGFNFFCETFAAPTAGDGFFASYFNKQMAGNALRIYNTLDIVPMAWCATSLNYSLTLYDDPIDESTRNMVCSGIDKVVNNNLNYTQWGMGSANMELRLCGKPQSDCTGYKSQSGYQHIYEYMTLLGLQPADIPMPP

SEQ ID NO: 515 - protein, 330 aa, Unknown
  Spicies not identified
MTSLDSLQQRQISLTHAFVVNNAARYSPSWKNIKNPSPSQVKDNILSRLNGSKVGGGYGVAWGPALVMDGEYTAHITVVLIGGRNENDIVVVTSGTLLNSPLDQLDDLDIFPMVPLQKLIKSCPVPANISQGTAGGVHAILHTASKIGSQGTLCDFLGKQRSGATIRLVGHSLGGALMSVVALYLKDKFSGFNFYCETIAAPTAGDGFFASYFNKQMAGNALRIYNTLDVIPMAWCATSLDFSLTLYEPTNVIDEDTKKAVCRGIDTVTNNNLNYTQWGMGSAQMELRLCGKLQSSCTSYKAQSGYQHIYEYISLLGLQPGDIPMPPFGS

SEQ ID NO: 516 - protein, 330 aa, Unknown
  Spicies not identified
MTSLDSLQQRQISLTHAFVVNNAARYSPSWENIKNPSPNQVKDNILSRLNGSKVGGGYGVAWGPALVMDGDYTAHITVVLIGGKNENDIVVVTSGTLLNSPLDQLDDLDIFPMVPLQKLIKSCPVPANISQGTEGGVHAILHTASKIGSQGTLCDFLGKQRSGATIRLVGHSLGGALMSVVALYLKDKFSGFNFYCETIAAPTAGDGFFASYFNKQMAGNALRIYNTLDAIPMAWCATSLDFSLTLYEPTNVIDEDTKKAVCRGIDTVTNNNLNYTQWGMGSAQMELRLCGKLQSSCTSYKAQSGYQHIYEYMSLLGLQPGDIPMPPFGS

SEQ ID NO: 517 - protein, 330 aa, Unknown
  Spicies not identified
MTSLDSLQQRQISLTHAFVVNNAARYSPTWENIKNPSPSQVKDNILSRLNGSKVGGGYGVAWGPALVMDGDYTAHITVVLIGGKNENDIVVVTSGTLLNSPLDQLDDLDIFPMVPLQKLIKSCPVPANISQGTEGGVHAILNTASKIGSQGTLCDFLGKQRSGATIRLVGHSLGGALMSVIALYLKDKFSGFNFYCETIAAPTAGDGFFASYFNKQMAGNALRIYNTLDVIPMAWCATSLDFSLTLYEPTNVIDDDTKKAVCLGIDIVTNNNLNYTQWGMGSAQMELRLCGKLQSSCTSYKAQSGYQHIYEYMSLLGLQPGDIPMPPFGS

SEQ ID NO: 518 - protein, 330 aa, Unknown
  Spicies not identified
MTSLDSLQQRQISLTHAFVVNNAARYSPTWENIKNPSPSQVKDNILSRLNGSKVGGGYGVAWGPALVMDGDYTAHITVVLIGGKNENDIVVVTSGTLLNSPLDQLDDVDIFPMVPLQKLIKSCPVPANISQGTEGGVHAILHTASKIGSQGTLCDFLGKQRSGATIRLVGHSLGGALMSVVALYLKDKFSGFNFYCETIAAPTAGDGFFASYFNKQMAGNALRIYNTLDAIPMAWCATSLDFSLTLYEPTNVIDEDTKKAVCRGIDTVTNNNLNYTQWGMGSAQMELRLCGKLQSSCTSYKAQSGYQHIYEYISLLGLQPGDIPMPPFGS

SEQ ID NO: 519 - protein, 330 aa, Unknown
  Spicies not identified
MTSLDSLQQRQISLTHAFVVNNAARYSPTWENIKNPSPSQVKDNILSRLNGSKVGGGYGVAWGPALVMDGDYTAHITVVLIGGKNENDIVVVTSGTLLNSPLDQLDDVDIFPMVPLQKLIKSCPVPANISQGTEGGVHAILNTASKIGSQGTLCDFLGKQRSGATIRLVGHSLGGALMSVIALYLKDKFSGFNFYCETIAAPTAGDGFFASYFNKQMAGNALRIYNTLDVIPMAWCATSLDFSLTLYEPTNVIDDDTKKAVCRGIDIVTNNNLNYTQWGMGSAQMELRLCGKLQSSCTSYKAQSGYQHIYEYMSLLGLQPGDIPMPPFGS

SEQ ID NO: 520 - protein, 330 aa, Unknown
  Spicies not identified
MTSLDSLQQRQISLTHAFVVNNAARYSPSWENIKNPSPNQVKDNILSRLNGSKVGGGYGVAWGPALVMDGDYTAHITVVLIGGKNENDIVVVTSGTLLNSPLDQLDDLDIFPMVPLQKLIKSCPVPANISQGTEGGVHAILHTASKIGSQGTLCDFLGKQRSGATIRLVGHSLGGALMSVVALYLKDKFSGFNFYCETIAAPTAGDGFFASYFNKQMAGNALRIYNTLDAIPMAWCATSLDFSLTLYEPTNVIDEDTKKAVCRGIDTVTNNNLNYTQWGMGSAQMELRLCGKLQSSCTSYKAQSGYQHIYEYISLLGLQPGDIPMPPFGS

SEQ ID NO: 521 - protein, 331 aa, Unknown
  Spicies not identified
MTSLDSIQQRQISLTHAYVVNNAAKYSPSWQNIKNPSPLQVKDNILSRLNGSKVGGGYAVVWGPALVPDGDGVAHITVVLMGGRNENDIVVVTSGTIDGSLKDQVDDLDISTMVPLQSIIKNCQAQANIAQGTADGVNAILTTASTIGSQGTLCDFLGKLQSGAKIRLVGHSLGGALMSVVALYLKDKFPSFNFYCETFAAPTAGDGFFASYFNKQMAGNALRVYNTMDVVPMAWCATSLDFSLTLYEPTNVIDGSTREAVCSAIDTVTSKNLNYTQWGMGGANMELRLCGKIQSPCPSYRAQSGYQHIYEYISLLGLQLGDIPMPPPSGS

SEQ ID NO: 522 - protein, 330 aa, Unknown
  Spicies not identified
MTSLDSLQQRQISLTHAFVVNNAALHSQSWKNMKNPTPSQVKDNILSRLNASKVGGGYGVAWGPALVMDGEHAAHITAVLIGGKNENDIVVVTSGTLKDSLKDQVDDLDIFPMVPLQSVITSCQVPANIAQGTSDGVHAILTTASTIGSQGTLCDFLGKQQSGATIRLVGHSLGGALMSVVALYLKDKFPGFKFYCETIAAPTAGDGFFASYFNQQMAGNALRIYNTLDVVPMAWCATSLDYSLTLYDADPIDETMRNMVCSKIDTVVTNNLNYTQWGMGNANMELRLCGQPQSKCTGYESQSGYQHIYEYMTLLGLQLSDIPMPPPFGS

SEQ ID NO: 523 - protein, 329 aa, Pseudomonas mediterranea
MTTPDTLLQRQISLTHAFVVNNAALHPQSWKNMKNPTPSQVSDNILTRLNASKVGGGYGIAWGPALVMDGEHAAHITVVLTGGKSGHDIVVVTSGTLKDSMKDQVDDLDIFPMVPLQNVIPGCLVTASIAEGTSKGANAVLAQTPTVGSQDTLCDFLGRLQSGTNIRLVGHSLGGALMSVIALYLKDKLPAFNYFCETFAAPTAGDGLFASYFNKQMAGNALRIYNTLDVVPMAWCATSLNESLTLYDIAIDDFMRNSVCSNIDKVVSNNLNYTQWGMGSANMELRLCGKPQSDCTTYESQSGYQHIYEYMTLLGLQPSDIPMPPFGSQ

SEQ ID NO: 524 - protein, 329 aa, Pseudomonas corrugata
MTTPDTLVQRQISLTHAFVVNNAALYSQSWQNIKNPRPDQVKDNILSRLNGSKVGGGYAVAWGPALVMDGEYAAHITAVLIGGRSGNDVVVVTSGTLKDSLKDQVDDLDIFPMVSLQSIIPGYQGSARIAQGTSDGVSAILNKASAIGSQGTLCDFLGKLQSGTSIRLVGHSLGGALMSVVALYLKDKFPGFNFFCETFAAPTAGDGYFASYFNKQMAGNALRIYNTLDVIPMAWCATSLDYSLTLYDNNPVDENTRKMVCSAIDKVVDNNLNYTQWGMGSANMELRLCGKPQSDCTSYDSQSGYQHIYEYMTLLGLQPTDIPMPPFGS

SEQ ID NO: 525 - protein, 356 aa, Burkholderia pseudomallei
MATELDPPDSFDPFDSIDSYDLFDSLDERQTNFTLSCAMDWGQNIKNPTTDILGKLIIGYLGKSTKTKNNRFSIVWGPAVYVDPLSGYAANVTAIFKNTSNDKDYRLAFSGTNPNSQFADIVIEDNDVKNLTPFSKYVSNCPPDALIANGTAKALDITLQTLPSNSSTSLTDFLKNLPKGSTLTVTGHSLGGVLASTFALYFSQSSGYPFKNVFCHSFAAATAGNVAFVAYSDGSLTGKMKRLWHRYDVIPSSWNLSTMNRIKYIYEPNLFPTEDFIRKIRKIVYYFSNKHIYYAQPGSLDHSQQFELEGAYHSGFKVFTDEAGWQHTFGYLAPLSLTANDLNEGEPWQPSLGTLA

SEQ ID NO: 526 - protein, 330 aa, Pseudomonas chlororaphis; identical to SEQ ID NO: 508

SEQ ID NO: 527 - protein, 328 aa, Pseudomonas species
MTSPDTLLQRQISLTHAFVVNNAALHSQTWTDMKNPTSSQVSDNIITRLKASKVGGGYDIVWGPALVPDGEHVAHITVVLADVNNENNLVVVTSGTLIDSMKDQVDDLDIFPMVSLQSVIPGCQVTASIAEGTAKGVSAILTTASTVGSQDTLCDFLGKQKSGTNIRLVGHSLGGALMSVVALYLKDKFPGFNYFCETFAAPTAGDGLFAGYFNKQMAGHALRIYNSLDVVPMAWCATSLNFSLTVYDNAIDDFMKNSVCSNIDKVVNNNLNYTQWGMGSANMELRLCGKPNSDCTSYESQSGYQHIYEYMTLLGLQPGDIPMPPSGS

SEQ ID NO: 528 - protein, 356 aa, Burkholderia pseudomallei
MATELDPPDSFDPFDSIDSYDLFDSLDERQTNFTLSCAMDWGQNIKNPTTDILGKLIIGYLGKSTKTKNNRFSIVWGPAVYVDPLSGYAANVTAIFKNTSNDKDYRLAFSGTNPNSQFADIVIEDNDVKNLTPFSKYVSDCPPDALIANGTAKALDVTLQTLPSNSSASLTDFLKNLPKESTLTVTGHSLGGVLASTFALYFSQSSGYPFKNVFCHSFAAATAGNVAFAAYSDGSLTGKMKRLWHRYDVIPSSWNLSTMNRIKYIYEPNLFPTEDFIRKIRKIVYYFSNKHIYYAQPGSLDHSQQFELEGAYHSGFKVFTDEAGWQHTFGYLAPLSLTADDLNEGEPWQPSLGTLA

SEQ ID NO: 529 - protein, 310 aa, Pseudomonas vranovensis
MGRSRSLEKMLAEEKRNKERLDEISRELDSQLKDADQALRQQAKSFYQNDGRNWKYNEYLSGQQSDFQLEDSWSLDNLSSIIDKISSAVVGTVTGNITNVPEGTSVAADAEKINKTGDLTTDTRLLVATNCFNLLSGIVNSFGSISKVQVHTGSSTIPIGQGLRIFATVATNVSQQRSFFNNKILCTYRYAYFVPYSLDEFHQQAERTLVAQYERTLNTLNKASQQNDDKFANGTIDLDQYLETADKLEARTLEVIRKIEQLKKQDGDLKGIAELHMRQTAFLVGRKIELARTKNLATRFDKLLSTLKSA

SEQ ID NO: 530 - protein, 310 aa, Pseudomonas mosselii
MGRSKSLEKMLAEEKRNKERLDEISAELDVQLKGADEALRQQAKNFYQNDGRNWKYSEYISGKQSDFQLEDSWSLDNLSKIIDKISSAVVGTVTGQITNVPEGTTVAPDAEKINKTGDLTTDTRLLVATNCFNLLSGIVSSFGSISKVQVHTASSTIPIGQGLRVFASVATNVSQQRSFFNNKILCTYRYVYFVPYSLDEFHEQAERTLVAQYERTLNALNKASQQNDDKFSNGSIDLDQYLETADKLEARTLDVIRKIEQLKKKDGDLKGIAELHMRQTAFVVGRKIELARTKNLAQRFDKLLQALKSA

SEQ ID NO: 531 - protein, 318 aa, Pseudomonas vranovensis
MGRSNSVNKLLEEEKKNRERLEQISRDLITQQKNAESELQADQIQFYTNSQRTWKYSSYVTGANSDFQLSDTWSLENLKKIIDQITNAVVGTVTGTITGLPEGTTASPDATKTNASGGLTEDTRLMIAANCLNLLSGLINSFGHSSKIQVSTAKSSVPLGQGLRIFASVACNVSQERSFFNNKIMSCYRYCYNVNYSLDEFSEQAERTLVAQYELTLNALNTAAKLNYDNFVSKQIDIRQYMETADYIEEKTVQVVAKIEALKRKDGDLAGISTLYQKQLAFLQGCKVEFGFDSKVSTHIQGQVDKFSGDSKVALGKR

SEQ ID NO: 532 - protein, 318 aa, Pseudomonas poae
MGRSNSVNRLLEEEKKNRDRLDQISRDLVVQQKNAETELQADQLQFYVNSQRTWKFSPYVTGANSDFQMSETWSLENLKNIINQITNAVVGTVTGQITGLPDGTSASPDATATNAKGGLTEDTRLLIAVNCLNLLTGIVNSFGKSSAIQVNSAKSTIPIGQGLRIFASVACNVSQERSFFNNKVMSCYRYCYNISYSLDEFTEQAERTLVAQYELSLNALNSAAKDNYSNYTSKKIDIRQYMETADYLEEKTLQVIAKIKALKSKDGTLAGIKSIYKDQIAFLTSCKIEYGFDPEVSTHIQAQIKKLSGDSKEALATA

SEQ ID NO: 533 - protein, 240 aa, Unknown
  Spicies not identified
MSLDNLNAIIQQITSAVVGILGPVGKLPEGVETSPDVESINKEGGITDDMRLLVASNCLNLLTGIVNSFGKSSKVQVSTATSSIPIGQGLRIFASVSCNVTQERGFFNNQVMSSYRYGYVVSYSLDEFLQQAEQTLVAQYEMTLNALNIAAKDNYNSFVKKEIDLRQYKETADFIEEMTIDIIEKIKVLNQRERASDRTQTVYADQIKFLKHCLIEYGFDAEVSTHITAQIKKLSHLSAA

SEQ ID NO: 534 - protein, 309 aa, Pseudomonas protegens
MGTSNSVKKLLEKSERDRKRLEEIDNDLEAKVAHMKNELREEQGYFYENSQRNWKFSDYVSGAHSDFQTSATWSLDNLSAMIQNITNAVVGALGPVKDLPDGAEVSKGVAEINKDGGITQDVRLLVAANCLNLLSGIVNSFGKSSKVQISSAKNSIPIGQGLRIFAAVACNVTQEKGFFDNKVMNCYRYGYLISYSLDEFIEQAEMALVAQYELTLNAFNMAAKDNYNDFVNKEIDLRQYKETADMIEEMTIEVIEKIKALNQKDGESARTLTVYKSQIEFLKSCLVNYGFDSEVSKGIKAQLVKLSNF

SEQ ID NO: 535 - protein, 310 aa, Unknown
  Spicies not identified
MNNSVKKLLEQSKQNEKRLEEIKKELEAQQTEAGKTLREEQKSFYVNNQREWKFSDYVYGANSDFQTSATWSLDNLNAIIQQITSAVVGILGPVGKLPEGVETSPDVESINKEGGITDDMRLLVASNCLNLLTGIVNSFGKSSKVQVSTATSSIPIGQGLRIFASVSCNVTQERGFFNNQVMSSYRYGYVVSYSLDEFLQQAEQTLVAQYEMTLNALNIAAKDNYNSFVKKEIDLRQYKETADFIEEMTIEIIEKIKVLNQRERASDRTQTVYADQIKFLKHCLIEYGFDAEVSTHITAQIKKLSHLSAA

SEQ ID NO: 536 - protein, 308 aa, Pseudomonas
MGMNNSVKKLLEQSKQNEKRLEEIKKELEAQQAEAGKTLREEQKNFYVNNQREWKFSDYVYGANSDFQTSATWSLDNLNAIIQQITSAVVGILGPVGKLPEGVETSPDVESINKEGGITDDMRLLVASNCLNLLTGIVNSFGKSSKVQVSTATNSIPIGQGLRIFASVSCNVTQERGFFNNQVMSSYRYGYVVSYSLDEFLQQAEQTLVAQYEMTLNALNIAAKDNYNSFAKKEIDLRQYKETADFIEEMTIEIIEKIKVLNQRERALDRTERVYEDQIKFLKHCLIEYGFDAEISTHITAQIKKLSH

SEQ ID NO: 537 - protein, 309 aa, Unknown
  Spicies not identified
MGTSNSVKKLLEKSERDRKRLEEINNDLEAKVAHMKNELREEQGYFYENSQRNWKFSDYVSGAHSDFQTSATWSLDNLSAMIQNITNAVVGALGPVKDLPDGAEVSKGVAEINKDGGITQDVRLLVAANCLNLLSGIVNSFGKSSKVQISSAKNSIPIGQGLRIFAAVACNVTQEKGFFDNKVMNCYRYGYLISYSLDEFIEQAEMALVAQYELTLNAFNMAAKDNYNDFVNKEIDLRQYKETADMIEEMTIEVIEKIKALNQKDGESARTLTVYKSQIEFLKSCLVNYGFDSEVSKGIKAQLVKLSNF

SEQ ID NO: 538 - protein, 308 aa, Unknown
  Spicies not identified
MGKSPSIEEMEKKDKKSREYLNGIADELTSKLGDTYDLLEKEAEAFYTKGHEKPWVSDIYITGKQFDYQSIQEWSLASVASIINKISSAVIGTIDGKIENLPAGTDAGDKAKDINKKYDMNQDKRLLIATNCFNLLAGIVGSFGNATSITVKHGMKSDPIGGGLRIFGSVGTQTFQRSSFFNNEKIATYQFAYIIKFSVDEFELQAKIALIDQYQNTLNVTKFASDKNDQQFYNDEISYEQWSVMSGKFEKVMEDVLRKIRELDPSKKRGTQLVKAFIAHDSLYRLVYESNKYLLEAIERREAKLLKI

SEQ ID NO: 539 - protein, 308 aa, Unknown
  Spicies not identified
MGKSPSIEEMEKKDKKSREYLDEIANELTNKLGNTYATLEKEAENFYKKEHEKPWSSDLYITGKQFDYQSVQEWSLASVSAIINKISAAVIGTVDGKVENLPAGTDAGDKAQDINKKYDMNKDKRLLIATNCFNLLAGIVGSFGNATSITVKHGTKSDPIGGGLRIFGSVGTQTLQRSSFFNNEKIATYQFAYIVRFSVEEFELQAKIALIDQYQNTLNVTKFASDKNDQQFFEDKITYEQWSVMSAKFEKVMEDVLKKIRELDPKKERGTQLAKAFIAHDILYKILYSGNKFLLKAIKHREAILAKI

SEQ ID NO: 540 - protein, 308 aa, Unknown
  Spicies not identified
MGKSPSIEEMEKKDKKSREYLDEIANELTNKLGNTYATLEKEAENFYQKEHEKPWSSDLYITGKQFDYQSVQEWSLASVSAIINKISAAVIGTVDGKVENLPAGTDSGDKAQDINKKYDMNKDKRLLIATNCFNLLAGIVGSFGNATSITVKHGTKSDPIGGGLRIFGSVGTQTFQRSSFFNNEKIATYQFAYIVRFSVEEFELQAKIALIDQYQNTLNVTKFASDKNDQQFFEDKITYEQWSVMSAKFEKVMEDVLKKIRELDPKKERGTQLAKEFISQNGLYRIFYSSNKHLLEAIKRREAGLLKI

SEQ ID NO: 541 - protein, 308 aa, Unknown
  Spicies not identified
MGKSPSIEEMEKKDKKSREYLDEIANELTNKLGNTYATLEKEAENFYQKEHEKPWSSDLYITGKQFDYQSVQDWSLASVSAIINKISAAVIGTVDGKVENLPAGTDAGDKAQDINKKYDMNKDKRLLIATNCFNLLAGIVGSFGNATSITVKHGTKSDPIGGGLRIFGSVGTQTFQRSSFFNNEKIATYQFAYIVRFSVEEFELQAKIALIDQYQNTLNVTKFASDKNDQQFFEDKITYEQWSVMSAKFEKVMEDVLKKIRELDPKKERGTQLAKEFISQNGLYRIFYSSNKHLLEAIKRREAGLLKI

SEQ ID NO: 542 - protein, 308 aa, Unknown
  Spicies not identified
MGKSPSIEEMEKKDKKSREYLDEIANELTNKLGNTYSALEKEAEDFYTKEHDKPWSSDLYITGKQFDYQSVQEWSLASVSAIINKISAAVIGTVDGKVENLPAGTDAGDKAQDINKKYDMNKDKRLLIATNCFNLLAGIVGSFGNATSITVKHGTKSDPIGGGLRIFGSVGTQTFQRSSFFNNEKIATYQFAYIVRFSVEEFELQAKIALIDQYQNTLNVTKFASDKNDQQFFDDKITYEQWSVMSAKFEKVMEDVLKKIRELDPKKERGTLLAQAFIAQNSLFKLFYSSNKHLLDAIARREAGLLKI

SEQ ID NO: 543 - protein, 308 aa, Unknown
  Spicies not identified
MGKSPTIEEMEKKDKKSREYLDEIANELTNKLGNTYSALEKEAENFYTKEHDKPWSSDLYITGKQFDYQSVQEWSLASVSAIINKISAAVIGTVDGKVENLPAGTDAGDKAQDINKKYDMNKDKRLLIATNCFNLLAGIVGSFGNATSITVKHGTKSDPIGGGLRIFGSVGTQTFQRSSFFKNEKIATYQFAYIVRFSVEEFELQAKIALIDQYQNTLNVTKFASDKNDQQFFEDKITYEQWSVMSAKFEKVMEDVLKKIQELDPKKERGTLLAKAFIVHNSLYKFLYSSNKHLMDALAKKEVSLLKI

SEQ ID NO: 544 - protein, 308 aa, Unknown
  Spicies not identified
MGKSPTIEEMEKKDKKSREYLDEIANELTNKLGNTYSALEKEAENFYTKEHDKPWSSDLYITGKQFDYQSVQEWSLASVSAIINKISAAVIGTVDGKVENLPAGTDAGDKAQDINKKYDMNKDKRLLIATNCFNLLAGIVGSFGNATSITVKHGTKSDPIGGGLRIFGSVGTQTFQRSSFFKNEKIATYQFAYIVRFSVEEFELQAKIALIDQYQNTLNVTKFASDKNDQQFFEDKITYEQWSVMSAKFEKVMEDVLKKIQELDPKKERGTLLAKAFIVHNSLYKLLYSSNKHLMDALAKKEVSLLKI

SEQ ID NO: 545 - protein, 308 aa, Hafnia alvei
MGKSPSIEEMEKKDKKSREYLDDIANELTNKLGNTYATLEKEAENFYQKEHEKPWSSDLYITGKQFDYQSVQEWSLASVSAIINKISAAVIGTVDGKIENLPAGTDAGDKAQDINKKYDMNKDKRLLIATNCFNLLAGIVGSFGNATSITVKHGTKSDPIGGGLRIFGSVGTQTFQRSSFFNNEKIATYQFAYIVRFSVEEFELQAKIALIDQYQNTLNVTKFASDKNDQQFFEDKITYEQWSVMSAKFEKVIEDILKKIRELDPKKERGTQLAKEFISQNALYRIFYSSNKHLLEAIKRREAGLLKI

SEQ ID NO: 546 - DNA, 633 bp, Pseudomonas rhodesiae
atgtctggttcttctcaacaatctgtcggtttattcccactctgctatcaaattggtactcagcaaccgggtgcacaaaacctggcgctcaatctgctggtgtttacacctgagcaaacggtaagcggtactgccgccatcactcaggcaaccaacccgccgctggatgtgcattccgatgtctggggtgaatatacctacatgacggtgatgaaacccggcgtcagcaaaatcctcatcaccgttcaaggcaaccaaggtggcccgagttctaactccatcgtgaatttcaagttgcatctggtggtcggtagcgactggaaagcgggcgtcgccaactacgagtatttcaatggtcagcgctgggtcaaggtcaatgcgcccgcccatctcgtcgagtcagtgccttccagggcctatccactgccgctggaacccggcccggtcatcctgccgtatccgccgatcatgccgctgtacgccgcgccgattcagagtgccatcgccagcggtgacctggcccagatgaaaaatctggcgagccttgccaaacaacaactggaccagcaaccacagctgcaaagtgcgcttgaggccgccaagggtgaaatcagcaggctggaacgcagctga

SEQ ID NO: 547 - DNA, 582 bp, Pseudomonas rhodesiae
atgtcaattggactttttcacacgcgcctcaacgtttccagctcgctgatcggcgcaccggttttaaccctggatctgctggtggataccgtcaacaagaaagtcagcggtgttgcgagcatttttcaaagcacctatccacccctcaactttcgtgcccgggtatggggtgagtattccgaggccaaactgaccgccgatacggaaaaccacatcatcctcactttggatggcagcccgagtggcccttacagccagatcgcccagaccttcgacctgcgcggcattctaggcgccgattgggccagcggttttgccgactacaagtactacgatcaggaccactggacgacagtcagacacgcggctgtcagccaggccccggctcagcacccggagcatccgtcacatgttgtgcgcccgctctacgccgtcgccgtgcagcaagcgcaagccagcggtgacctggcgcagctgaaaaccgtggtgagccaaggcgaacaacaactggccaacagcggtgccttgcgcagtgcgctggagcagttgcaagcagaaatcacccgactggaagcacgctaa

SEQ ID NO: 548 - DNA, 579 bp, Pseudomonas frederiksbergensis
atgtcaatcggactttttcacacccgcctgaacgtcaacaatcacttactcggcgcaccggttttaaccctggatctgctggtagataccgtaaacaagaaagtcagcggtgtggccagcatttatcaaagtacctaccctccactcaacttccgtgctcgtgtatggggtagttactccgaagccaaactgatccccgaggcggaaagccatatcctcctctccctggatggcagcccaagcggcccttacagccagatcgcccagaccttcgacctaaggggcattttaggcgccgattgggccagcggttttgccgactacaagtacttcgatcaagaccactggactaccgtaagacacgcagccgtcacccaggcgcccgttattgtgcgccctgagcatccgcaccacgcggtaccgctctacgccgttgcggtgcagcaagcgcaagccagcggtgacctggcgcaactgaaggccgtggtcagccaaggtgaacagcaactggcccacagcggtgccctgcgcaatgcgctggaccagttgaacgccgaaatcgctcgcctggaggcccgc

SEQ ID NO: 549 - DNA, 633 bp, Pseudomonas frederiksbergensis
atgtctggttctactcagcaatctgtcggcttgttcccgctctgctaccgaattggtacttcggcaccgggcgcacaaagtctggcacttaatcttttggtctttacccctgagcaaacggtaagcggcactgccgcaattactcaggccaccaacccgccgctggatgtgcactccgatgtctggggcgaatacacctacctgacggtcatgaagcccggtgtcagcaagatactgatcaccgctcaaggcaataatggcggtccgggttcgaactccatcgtgaacttcaagttgcatctggtggtcggtagcgactggagagaaggcgtcgccaattacgagtacttcaatggtcagcggtgggtcaaggtcactgctcccgcccatctcgtcgaatccgtgccctccaacgcttataaatcagcgcctttggagcccggtccggtcattccggcgtatccaccgatcatgccgctgtacgccgcacccattcaaagtgccattgccagcggtgacctggcccagatgaaaaacctggcgcgtctggcccagcaacaactggatcagcaaccccaactgcaaagtgcgctcgaaacggccaagggtgaaatcagccgacaggaacgccgc

SEQ ID NO: 550 - DNA, 630 bp, Pseudomonas fluorescens
atgtctggttcagttcagcaacaaaatgtcggcttgttcccggtgagctaccggatcggtacgggtcagccgggggcgcagagtcttgcgctgaacctgctggtgtccacaccgcagcatgaagtcagtggcacttccgccatcactcaggcaaccaacccaccactggacatcgattcggatgtctggggcgaatacacctacctgacggtcatgaagcccggtgtcagtaaaatcctgattaccgccgagggcaatgaaggcggccccggctccaactccatcgtgaacttcaagattcaactggtggtcggcaccgactggcgtgaaggcgtggccaattacgagtatttcgacggacaacgctggcacgaactgaacaacgtgccggcgcatctggtcgaggtgccctcgaatgtcttccagccgttccatcccggtccggtgattcttccgcatccgccgatcctgccgctgtatgccgcgccgatccagagcgccatcgccagtggcgacctggcccagatgaaaaacctggcgaagctcgcccagcagcaactggatcagcaaccccaactgcagaaggcactggacgccgccaaaagcgaaatcagcaagctgcaggcccgc

SEQ ID NO: 551 - DNA, 576 bp, Pseudomonas fluorescens
atgtcgattggactttttcatacccgcctcatcgccagtaattcactgcttggcgcaccggtcctgaccctcgacctcgtggtcgataccgcgcgtaaaaaagtcagcggcgctgcgagcgtctttcaaagcacctggccaccggtcaacttccatgcacgggtctggggcgattattccgaggcacggctgaccccatcgaccgagaattacatcattctcaccctcgatggcagcccgagcggtccgctgagtcagattgcgcagaccttcagcctcaagggcatcctcaacgactggaccagcggctttgtcgattaccgttacaacgagggaggtcagtggcattacgtgaggcacgttgctgtgcatcaggcgccgaccatcgagccgcaaccgcaagagcgtcacttccagccgctgtatgccgtggccgtgcagcaagcgcaaaccagtggcgatctggtgcagctgaaaactgtggtgcaacagggcgaacagcaactggcccaccatggcgcattgcgcagtgcccttgagcaactgaacgcggagattgcccgactggaagcacgc

SEQ ID NO: 552 - DNA, 642 bp, Pseudomonas protegens
atgtccggttccacttcgtccaatcttggcttgtttcccctcagctaccggatcggcacttcgatccccggcgcgccgagcctcaccctcgacctgctggtctacacccccgagcagaccgtgcgcggcacctcgctggtgacccaggccaccaacccgccgctggagctgcagtccgatgtgtgggggcaatacacctacctgaccgtcatgccacccagcaccagcaagatcctggtcaccgcccagggtaatcagggcgggccgggctcgaactcgatcatcactttcaagattcaactggtggtggatcacgactggaagaacggcatcgccaactaccagtactacaacggccagcgctgggtatcggtggagaacgttcccgcccacctcgtcgagtcggtgccctcctacgccttctcagccttgccgataccgctggagcccggcccggtcctgctgccctatccaccgatcaccccgctgtatgccgcgccgatccatggcgccatcgccagcggcgacctggcccagatgaagagcctggccagcctggcccagcagcaactggagcagttgccccagctgcgcagcgcgctggacgcggccaaggacgagatcggcaggctcgagcggcgc

SEQ ID NO: 553 - DNA, 579 bp, Pseudomonas protegens
atgcaaactggactgttccatacccgcatccaagccaccacggggctgttgggtgccccggttctgaccctcgacctgttggtcaacaccgtgcagaaaaaagtcagcggcgtggcccgagtgttcaagagcacctacccgccggtgaacttcttcgccgacgtgtggggcgattactcccagttacagctgcacccgtcgaccgaaggccacatcatcctgagcctgaccggcaaccccagcggtccgaccagccagattgccgcgaccttccaactgcacgggattctcgggctcgactgggccagtggtttcgccagctacaaatactgctaccagggcaactggcaggacgtgcagcacgccacggtcagccaggcatcgatcccgcaccccgagcccgtgcctcatcaccccgtgccgctgtatgcggtggcggtgcagcaggcacaaagcagcggtgacctggcgcagctcaaggcggtcgtccgccagggcgagcagcaactggccagcggcgatgcgctgcgcagcgccttgcagcagttgaacgccgagatcgcccgcctcgaagctcgc

SEQ ID NO: 554 - DNA, 627 bp, Pseudomonas protegens
atgtctggttctatctcccaagaaggcctgttccccctgagctaccgcatcggtacctcgcaacccggggccccgaccctgattctcaatctgctggtctacacccccgagcacagcgtgcgcggcacttcgtccatcactcaggcggtcaatccgcccctggacctgcacagcgatgtctggggtcagtacacctacctgacggtcatgccaccgagctccagcaagatcctcatcaccgcccagggcaatcagggcggacccggttccaactccatcatcaacttcaagctgcatctggtggtcagcgatgactggaaggaaggcgtggccaactaccagtactacaacggacacagctgggtaacggtcaatcaggtccccgcccatctgcaggagcccgtgcagtcgagcaccctctcggccccccaccatggccagcccaaccgtccgctgccgccgatctcggcgctgtacgcggcgccgatccacggcgccatcgccagcggcgacctgtcgcagatgaagagcctgcacaaggtggccacccagcaactggagcagctgccgttgatccgcacggcgctggaggcggccaaggccgagatcagcaagcacgagcggcgc

SEQ ID NO: 555 - DNA, 606 bp, Pseudomonas protegens
atgacaatcggactgttccatacccgcctcatcgtcgccaaccctgtgatcggagggccggtgctgaccctcgatctgctggtcaacacgccgcagaagaaagtcagcggcgtggcccgggtgactcagagcacctcgccaccgatgcacttcctcgcggatgtctggggcgactactcccaggtcaaactggacccctccagtgaaggccatatcatcctcagcctgaccggcaaccccagcggccccaccagccagattgccgaaaccttccatctgcagggcattctcggcctcgactgggccagcggtttcgccagctatcgctaccagtaccagggccattggcatgtggttcagcatgccgccgtgagccaggcgccggtggatcaagcggccaacgccgatctggcgcccaaggacgatcaacggcatctgtatccgcagccgctgtatgccgtggcgctgcaacaggcccagagcagcggcgatctgacacggctcaaggcgctggtggctcagggcgagcagcaactggccaacagtgacaacctgagccaggcggtgcagcagttacaggcggaaatcagccgcctggaacgtcgc

SEQ ID NO: 556 - DNA, 621 bp, Chromobacterium aquaticum
atgtcaggcaatactcagactgaaatcggattgttccccgtcagctacctcatcggcaacgatctggcgggcgcgccgacgctgctcttgaacctgctggtggcgccccccacccactctgtgaccggcagcgcccacgtcgtcaaccaaagcctccacccgccgctgaacctgcactcccatgttcacggccaatacgcctatctgggcgtggtgccgaccagcgagggccgcatcctgatctccgcccaaggccacaacggcaacaccaccaacttcaaattgcacctggtgctcagccacgactggaaaaaaggcatcgccaattacagctatctcgacggctccacatgggtggaagtggacaatgtgccggccaagctgaacccggaactgaaatcccgctatttcccgctgccgctggaacccggcccggtgatcctgcccaatccgcccatcaacgccctgtacggcgtgccgatccaaagcgccatcgccagcggcgacctggcccatatgaaaaccctggccgcttacgccaaacagcagctggacgcccagccgcaactgcgcaaggaactggatgcgctgaaggcggaaatcaccaagctggaccgcaaa

SEQ ID NO: 557 - DNA, 600 bp, Chromobacterium aquaticum
atgtcagcaacaggattgttccatgtccgttacctcatttcccaaccggtgctgggcgcgccggtcctgaccctggacttgctggtcgacacgccgcagaaaaagatcagcggccacgccagcatcacccagagcgtcagtccgccgctgcagttccaggccaatgtctggggccattacagccaggccaagctggacccgtcggccgagcatcacatcgtgctgtcgctggacggcagccccagttcgcccaatagccagatcgccgaaaccttccatctgcaaggcatcctcgatcaggactggcaggacggccacgccagctaccgcttcttctaccaggaagcctggcacaccgtcgcgcacgccatcgtcaccgaagcgccggccgtgcacccggagccgcgcgccggcagcaagccctatccgcaccccatcccgctgtacgccgccgcgctgcaacaatcgcgcgtcagcagcaatctggcgcagatgaagtccttggccggccaggcggaagagcagctgaagcagcacgacaatatcgaggccgcgctgaagcagctgcatgctgaaatcgcccgcctcgaaggccggcac

SEQ ID NO: 558 - DNA, 579 bp, Pseudomonas putida
atgtctgattcactgctcgcaccttcggtaggcctgtttccggtgtcctaccagataggcaacaacgccgctggcgctgcgcgcctgcaactggacctgctggttcacaccccggaccgcagcgtcaatggcacggcccagattacccaggccatcaacccaccgctggacctgcacctggatgtctggggcagctacacctacctcaccgtccagccgccgagcgacgccaggatcctgatcactgcccagggcaatcagggtgggccgcacgccaactcgcccgtgcacttcaagttcagggcgctgctcgatccgacctggcagcgcggtgtggctgactacgagtacttcaatggccagcgctgggtgagcgtggataacgtcccggtcacgctggaaggccagcgcatccagcagctggccaatgtcgacctgcacagcgaactgcacaacgccaccctggaggcggccattgccaacggtgatgtcgcgcagctcaagcagctggccaccggcggcctcgaccaggccattgctgcgaccaagtccccggccaccaaggccgccaagaaagcc

SEQ ID NO: 559 - DNA, 627 bp, Pseudomonas putida
atgtcgacctgcacagcgaactgcacaacgccaccctggaggcggccattgccaacggtgatgtcgcgcagctcaagcagctggccaccggcggcctcgaccaggccattgctgcgaccaagtccccggccaccaaggccgccaagaaagcctgagctggcaaggagatacaccatggcaatcggactgttccatgtgcgcctgaacgtcagcaacggcttgctcggcgcaccaaccctgaccctcgacctgctggtcaacactgtgaccaagaaggtctccggcaaggcccgcgccagccaggccacgtacccgcagcaacccttccaggccaacgtgtggggtgactacagcgagctgcagttcgcgccggccggcgcgccctcgatcgtcctcagcctggatggcagccccagcggcccgctcagccagatcgcgcagaccttccacctgcacggcctgctggaagccgactggagcaacggctcggccagctaccgttacttcagtaacggccactggctcgatcagcatggccgagtgcgcaaggcgccggatgtgacccaccagggccgtccgcaattggcgcagcggttgaaggcggccatcaaccagctggaaagcgtg

SEQ ID NO: 560 - DNA, 597 bp, Pseudomonas vranovensis
atgactgactcagtacaagcacccgtgataggactgttcccactgtcctatgttatcggcaccgatgcgcccggcgctcagcgcctggttctcgacctgctggtgcacccggccgatcgcaccctgcgcggcaccgctcagattacccagtccagcaatccgccgctggacctgcacctggatgtgtggggtacctacagctaccagctgttcctgccgccgagcccgagcagcatcctcatcaccctgcagggcaaccatggcggccctactgccaactcgccgattatcttcagtctgcacctggcggtcggcacggactggcaaaaaggccaggccggctaccgttacctgaacagccaggggcaatggattgtggtcgaggctccggcacaccgggaagacacccgcatcaaggccttcggtgacctcgatatcccagcgctgttgcacgccaccaccctggaggcggcgattgccactggcgatctcgcccacctcaaggccctggccgccggtgatgcgggcgctgccctgaacaccgccattgattcgaccaagagcgcttccggcaaagctggcaaatccagccgcgcc

SEQ ID NO: 561 - DNA, 477 bp, Pseudomonas vranovensis
atgcctgcaattggactgttccatacccgcctcaacgtccgcaccggtctgctcggtgcgccggtcctgaccctcgatctgctggtcaacaccgtgcagaagaagatcaccggcgtggccagcatcttcgcggccacttaccctccgctgaacttccacgccgacgtgtggggggactattccgacctcaagcttggcctcaaaggtgagggccatatcgtcctcaacctgaccggcagcccgagcggcccgttcagcaccctggagcagaccttccatctgcacgggattctcagtgccaactgggctcgcggtaccgccagctatcgctacctgccgctggatggcaggccatggcaggtggtgccgcatgccagcgtgcgccaggcaccgactgaaactcaccaggcccagaaggacgtcagcgaacatagccgcaatcgcttgcaggcggcgattgatcagctgaaaagcgct

SEQ ID NO: 562 - DNA, 525 bp, Serratia nematodiphila
atgcctattaaaaagtatgtcattcttgatagcgcgcccaaagctgtcggcaattccgattttattctattagggttaaagagcgaaggttttgccagaggttgtccgatgttatttggcggcaccgccgatgctaaagatggcccggtcgatggaaaaaactttgcgttgaatgtaataaaaagagaaacctgggaagaaaccaataagaatattggcgtggaacaggtggtaagatatcaggtttaccccaatgacatcagcgtttataccagtaaagacttcactttcaccggaaaagtggccattggcggtgagtttgcctggattcgaaaagtgagcaaaggaaaaatcaaaacctattttaaaaacaaacccactgccaccaaagacatgtttgctcaagagctttacgcaatgacgctggatgtcgatattgaacccaccgatgcggagttcgaacagtatttatcttcagattgcctgagcgccatttacgcttactgtaaagaaaactgcaaataa

SEQ ID NO: 563 - DNA, 1608 bp, Serratia nematodiphila
atgctcgcaaaagattatacgtcagatgagaaacgcatcgtaaaaaacgttatcgaccgatacgagaacagcggcgtatttcttatcgagccagacgatccggttttaaccgaattttatgatattcaattaaaactggccggcgtcaccgcagccgccgcaccgcaattcagccaactttggcagcagacgaaacgcgtcaaacgggtagcgggccggatgagcgaggccaacaccagcggcgctcagccggtgtacagcatcgtcaggctggattccaccgacggtaaacgttatcaaaccgacgccatcggctctctgccggttcaggcgaccaatgtgacgcaaaccctcggcctgttcgacggcggcgccgataacgtcggcaaggtggaatacaaaagcgactacgtttacacggcggactgcaccatcggtgccagcggtgactatccgcaaagccagaccggcgacagctttccggttacggtgatctataccttcgcgcaaacggtcggccagcaaaccgtttacggcgccgaaatcgtcacgacgcaaagctacccgaaagaaatgatcaatgattcccccaggaatctatataaccagcgcatgatcaagatttgcctgacgcgtgacgatggcgactgtgattatcgcaccggctacgatcaggacggcacggttaaagtgccgataaaaggcaatatcacctattttggcaatattgatctcagcaatggcaagccggtcaacgccagcaatactatttatcttatccgcacccgcgccggcggcgatccgatcaccccttacggcggctataatatttttaattctgccgcaacccgaatcagcgggaataacatcacctgggatcttgactggctgaaattcaaccgcgtcgattttgaatccggcgagatggtttattacgtttttaaaattacgcttgatgtcgaaggccgcagtatcgccgcctttattactaacgcacccaaagaaagcgatccggatcgccgtctgctcaataccgtacaaatcaaaccgatgcagattatttatggctgcctggcagagggtacgttgattttaatgcaggatgggacagaaaagccgatcaatgctctcacggcggatgaattcgttatttgcggcaataaccaccccagacgcattgagaatatcaccacggggcaggagcagcattacattgacattaccgcccgcgaccaggcggcacgtgaatatcgtataaaagccagcctggggcaccctttcgtcaccgcaaacggtatttttctcgcccgtgaattgacctcaggcatgtgtcttaaaacccggcgcggtgagtgcgagattaccgccatctctctccagcccggtgagttaaccgtttataacctgcaactcggcgctgactctccgctgcaaaaaaaccaatgtgccctcagtactttttatgctaacggcgtgttggtcggtgacgcgctggttcaacatctctatgaagacgaatatcaccaacgcccaaaaaacgtgctgaaaacgttacccaccgagtggcaccaggattaccacaatatgatcaatgcagcggacgaataa

SEQ ID NO: 564 - DNA, 525 bp, Serratia marcescens
atgcctattaaaaagtatgtcattcttgatagcgcgcccaaagctgtcggcaattccgattttattctattagggttaaagagcgaaggttttgccagaggttgtccgatgttatttggcggcaccgccgatgctaaagatggcccggtcgatggaaaaaattttgcgttgaatgtaataaaaagagaaacctgggaagaaaccaatcagaatattggcgtggaacaggtggtaagatatcaggtttaccccaatgacatcagtgtttataccagtaaagacttcactttcaccggaaaagtggccattggcggtgagtttgcctggattcgaaaagtgagcaaaggaaaaatcaaaacctattttaaaaacaaacccactgccaccaaagacatgtttgctcaagaactttacgcaatgacgctggatgtcgatattgaacccaccgatgcggagttcgaacagtatttatcttcagattgcctgagcgccatttacgcttactgtaaagaaacctgcaaataa

SEQ ID NO: 565 - DNA, 525 bp, Serratia marcescens
atgcctattaaaaagtatgtcattcttgatagcgcacccaaagctgtcggcaattccgattttattctattagggttaaagagcgaaggttttgccagaggttgtccgatgttatttggcggcaccgccgatgctaaagatggcccggtcgatggaaaaaactttgcgttgaatgtaataaaaagagaaacctgggaagaaaccaatcagaatattagcgtggagcaggtggtaagatatcaggtttaccccaatgacatcagcgtttataccagtaaagacttcactttcaccggaaaagtggccattggcggtgagtttgcctggattcgaaaagtaagcaaaggaaaaataaaaacctattttaaaaacaaacccgctgccactaaagacatgtttgctcaagagctttacgcaatgacgttggatgtcgatattgaacccaccgatgcggagttcgaacagtatttatcttcagattgcctgagcgccatttacgcttactgtaaagaaacctgcaaataa

SEQ ID NO: 566 - DNA, 525 bp, Serratia marcescens
atgcctattaaaaaatacgtcattcttgatagcgcgccaaaagctgtcggcaattccgattttattttattaggcctaaagaatgaaggttttgccagaggatgtccgatgttatttggcggtactgccgatgctaaagacggcccggtcgatggaaaaaactttgcgttaaatgtaataaaaagagaaacctgggaagaaaccaatcagaatgtcggcgtggaacaggtggtaagatatcaggtttaccccaatgacatcagcgtttataccagtaaagacttcaccttcaccgggaaagtggccattggcggtgagttcgcctggattagaaaagtcagcaaaggtaaaatcaaagcttattttaaaaacaaacccactgccaccaaagacatgttcgcccaggaactttacgcaatgacgttggatgtcgatattgaacccaccgatgcggaattcgaacagtatttatcttcagattgcctaagcgctatttacgcttactgcaaagaaacctgcaaataa

SEQ ID NO: 567 - DNA, 525 bp, Serratia proteamaculans
atgcccattaaaaaatacgtcattctagacagtaatcccgcggccgttggtaataatgatttcattcttttaggtttaaaaaacaccggcttcgccaggggctgcccaatgttatttgggggtaccgctgatgcaaaagacggaccggttgacggtaagtattttgcactaaacgtcattaaaagagaaacctgggaagagacattacataatattgaagttcaacaggttgttcgttatcaggcttaccctaacgacatcagtttttataccagcaaagacttcaccttcaccgggaaagtagccctgggtggcgaatttgcctggatacgaaaagtcagcaaaggaaagttaaaagcttactttaaaagtaaaccttcagcgaccaaagcgatgtttgctcaagagctgtatggcatgactctggatcctgacatcgaccctactgatggtgaatttgaacaatatcttggctctgatagtctgagcgccatttattcttactgcaaagaaacctgtaaataa

SEQ ID NO: 568 - DNA, 525 bp, Serratia liquefaciens
atgcccattaaaaagtacgtcattctagacagtaatcccgcggccgttggtaataatgatttcattattttaggtttaaaaaacaccggcttcgccaggggcttcccaatgttatttgggggtaccgctgatgcaaaagacggaccggttgacggtaagtattttgcactaaacgtcattaaaagagaaacctgggaagagacattacataatattgaagttcaacaggttgttcgttatcaggcttaccctaacgacatcagtttttataccagcaaagacttcaccttcaccgggaaagtagccctgggtggcgaatttgcctggatacgaaaagtcagcaaaggaaagttaaaagcttactttaaaagtaaaccttcagcgaccaaagcgatgtttgctcaagagctgtatggcatgactctagatcctgacatcgaccctactgatggtgaatttgaacaatatcttggctctgatagtctgagcgccatttattcttactgcaaagaaacctgtaaataa

SEQ ID NO: 569 - DNA, 525 bp, Serratia plymuthica
atgcccattaaaaaatacgtcattcttgacagtaatccaaaagctgtcgggaataacgactttattctgttaggtttgaaagccaccggtttcgccagaggttgccccatgttatttgggggaaccgcagatgcaaaagatggtccggttgacggcaagaactttgccttaaacgtgataaaaagagaaacctgggaagaaactctaaagaatattgaagtcaatcaggttgttcgttatcaggcttatcccaatgatatcagcgtttataccagcaacgattttatcttcaccggccaggtcacccttggcggtgagttcgcctggatacgcaaggtgagcaaagggaaattaaaagcctactttcaaaataaaccttccgccaccaaagatatgtttgctcaagaacttttcagtatgaccgcggaccccaatatcgatccgaccgagggtgaatttgaagcctatcttggctccgacagtctgagcgccatttattcctattgcaaagcaacctgtaaataa

SEQ ID NO: 570 - DNA, 525 bp, Serratia plymuthica
atgcccattaaaaaatacgtcattcttgacagtaatccaaaagctgtcgggaataacgactttattctgttaggtttgaaagccgccggtttcgccagaggttgccccatgttatttgggggaaccgcagatgcaaaagacggcccggttgacggcaaaaactttgccttaaacgtgataaaaagagaaacctgggaagaaaccctaaagaatattgaagtcaatcaggttgttcgttatcaggcttatcccaatgatatcagcgtttataccagcaacgattttatcttcaccggccaggtcacccttggcggtgagttcgcatggatacgcaaggtgagcaaagggaaattaaaagcctactttcaaaataaaccttccgccaccaaagatatgtttgctcaagaacttttcagtatgaccgcggaccccaatatcgatccgaccgagggtgaatttgaagcctatcttggttccgacagtctgagcgccatttattcctattgcaaagcaacctgtaaataa

SEQ ID NO: 571 - DNA, 525 bp, Serratia plymuthica
atgcccattaaaaaatacgtcattcttgacagtaatccaaaagctgtcgggaataacgactttattctgttaggtttgaaagccaccggtttcgccagaggttgccccatgttatttgggggaaccgcagatgcagaagacggtccggttgacggcaagaactttgccttaaacgtgataaaaagagaaacctgggaagaaaccctaaagaatattgaagtcaatcaggtcactcgttatcagacttatcccaatgagatcagcgtttataccagcgacgactttaccttcaccggtcaggtcacccttaacggtgagtttgcctggatacgcaaggtgagcaaagggaaattaaaagcctactttcaaaataaaccttccgccacccaagatatgtttgctcaagaacttttcatcatgactgcagacgacaatatccagccgaccgacggtgagtttgacgcctatcttggttccgacagtctgagtgccatttattcctattgcaaagcaacctgtaaataa

SEQ ID NO: 572 - DNA, 525 bp, Serratia plymuthica
atgcccattaaaaaatatgtcattcttgacagcaatcctaaagctgtcgggaataatgatttcattctgctaggtttgaaagccataggtttcgccagaggttgtccgatgttatttggagggacagccgatgtaaaagacggaccggttgacggcaagaactttgccttaaacgtgataaaaagagaaacctgggaagaaaccctggagaatattgaagtcaatcaggtcgttcgttatcaaacttatcccgatgagatcagcgtttataccagcaacgactttatcttcaccggtcaggtaacccttggcggtgaattcgcctggatacgaaaagtcagtaaagggaaattaacggcctactttaaaaataagccttccgctaccaaagatatgtttgctcaagagcttttcagcatgaccgcggacccgaatatcgacccgaccgaaggtgaattcgaagcctatcttggctccagcagcctgagcgccctttactcctactgcaaagaaacctgtaaataa

SEQ ID NO: 573 - DNA, 525 bp, Serratia plymuthica
atgcccattaaaaaatacgtcattcttgacagtaatccaaaagctgtcgggaataacgactttattctgttaggtttgaaagccaccggtttcgccagaggttgccccatgttatttgggggaaccgcagatgcagaagatgggccggttgatggcaagaactttgccttaaacgtgataaaaagagaaacctgggaagaaaccctaaagaatattgaagtcaatcaggtcactcgttatcagacttatcccaatgagatcagcatttataccagcgacgactttaccttcaccggtcaggtcacccttaacggtgagtttgcctggatacgcaaggtgagcaaagggaaattaaaagcctactttcaaaataaaccttccgccacccaagatatgtttgctcaagaacttttcatcatgactgcagacgacaatatccagccgaccgacggtgagtttgacgcctatcttggttccgacagtctgagtgccatttattcctattgcaaagcaacctgtaaataa

SEQ ID NO: 574 - DNA, 543 bp, Leminorella grimontii
atgagcacaaaaaactacgtcattttagatacaaatcccagaagcaaccaaaatgatgacttcatcctgctaggtttaaaaaaccaaggttttgccagagggtgccccatgctttttggcggtaccgccgacgctaaaaaagatggccgccccgacgaaaaagacttcgcactaaaagtgatacggcgggaagtaagagaagaaacgggaaatagaattattgtcaatcaaataggaaagcgtatccactgcgccgcaggcgaagatatttccgtttataccagccacgattttcattttgacgggagggttaatttaggaaccgcaggagaattcgcctggatacgaaaagtcagcaagggaaaactcagcgccttatttgaaggagaagaaataaaaaattgtgaacagtttgggcgccaccttttcggcatgacgctggatgaaagcatcgatccgacatatgaacagtatcacgatgaatatctcccgtccgagtcgctaaaggccctctataagtactgcctcgcgctgttttcatag

SEQ ID NO: 575 - DNA, 1608 bp, Serratia marcescens
atgctcgcaaaagattatacgtcagatgagaaacgcatcgtaaaaaacgttatcgaccgatacgagaacagcggcgtatttcttatcgagccaggcgattcggttttaaccgaattttatgatattcaattaaaactggccggcgtcaccgcagccgccgcaccgcaattcagccaactttggcagcagacgaaacgcgtcaaacgggtagcgggccggatgagcgaggccaacaccggcggcgctcagccggtgtacagcatcgtcaggctggattccaccgacggtaaacgttatcaaaccgacgccatcggttctctgccggttcaggcgaccaatgtgacgcaaaccctcggcctgttcgacggcggcgccgataacgtcggcaaggtggaatacaaaagcgactacgtttacacggcggactgcaccatcggtgccagcggtgactatccgcaaagccagaccggcggcagctttccggttacggtgatctataccttcgcacaaacggtcggccagcaaaccgtttacggcgccgaaatcgtcacgacgcaaagctacccgaaagaaatgatcaatgattcccccaggaatctgtataaccagcgcatgattaagatttgcctgacgcgtgacgatggcgactgtgattatcgcaccggctacgatcaggacggcacggttaaagtgccgataaaaggcaatatcacctattttggcaatattgatctcagcaatggcaagccggtcaacgccagcaataccatttatcttatccgcacccgcgccggtggcgatccgatcaccccttacggcggctataatatttttaattctgccgcaacccgaatcagcgggaataacatcacctgggatcttgactggctgaaattcaaccgcgtcgattttgaatccggcgagatggtttattacgtttttaaaattacgcttgatgttgaaggccgcagtatcgccgcctttattactaacgcacccaaagaaagcgatccggatcgccgtctgctcaataccgtacaaatcaaaccgatgcagattatttatggctgcctggcagaggatacgttgattttaatgcaggatggtacagaaaagccgatcaatgctctcacgacggatgagttcgttatttgcggaaataaccaacccaagcgaattgagaatatcaccacggggcaggagcagcattacattgacattaccgcccgcgaccaggcggcacgtgaatatcgtataaaagccagcctggggcaccctttcgtcaccgcaaacggtatttttctcgcccgtgaattgacctcaggcatgtgtcttaaaacccggcacggtgagtgcgagattaccgccatctctctccagcccggtgagttaaccgtttataacctgcaactcggcgctgactctccgctgcaaaaaaaccaatgtgccttcagtactttttatgctaacggcgtgttggtcggtgacgcgctggttcaacacctctatgaagacgaatatcaccaacgcccaaaaaacgtgctgaaaacgctacccgccgagtggcaccaggattaccacaatatgatcaatgcagcggacgaataa

SEQ ID NO: 576 - DNA, 1608 bp, Serratia nematodiphila
atgctcgcaaaagattatacgtcagatgagaaacgcatcgtaaaaaacgttatcgaccgatacgagaacagcggcgtatttcttatcgagccaggcgatccggttttaaccgaattttatgatattcaattaaaactggccggcgtcaccgcagccgccgcaccgcaattcagccaactttggcagcagacgaaacgcgtcaaacgggtcgcgggccggatgagcgaggccaacaccagcggcgctcagccggtgtacagcatcgtcaggctggattccaccgacggtaaacgttatcaaaccgacgccatcggctctctgccggttcaagcgaccaatgtgacgcaaaccctcggcctgttcgacggcggcgccgataacgtcggcaaggtggaatacaaaagcgactacgtttacacggcggactgcaccatcggtgccagcggtgactatccgcaaagccagaccggcggcagctttccggttacggtgatctataccttcgcgcaaacggtcggccagcaaaccgtttacggcgccgaaatcgtcacgacgcaaagctacccgaaagaaatgatcaatgattcccccaggaatctgtataaccagcgcatgattaagatttgcctgacgcgtgacgatggcgactgtgattatcgcaccggctacgatcaggacggcacggttaaagtgccgataaaaggcaatatcacctattttggcaatattgatctcagcaatggcaagccggccaacgccagcaataccatttatcttatccgcacccgcgccggcggcgatccgatcaccccttacggcggctataatatttttaattctgccgcaacccgaatcagcgggaataacatcacctgggatcttgactggctgaaattcaaccgcgtcgattttgaatccggcgagatggtttattacgtttttaaaattacgcttgatgtcgaaggccgcagtatcgccgcctttattactaacgcacccaaagaaagcgatccggatcgccgtctgctcaataccgtacaaataaaaccgatgcagattatttatggctgcctggcagagggtacattgattttaatgcaggatgggacagaaaagccgatcaatgctctcacggcggatgaattcgttatttgcggcaataaccaccccaggcgcattgagaatatcaccacggggcaggagcagcattacattgacattaccgcccgcgaccaggcggcacgtgaatatcgtataaaagccagcctggggcaccctttcgtcaccgcaaacggtatttttctcgcccgtgaattgacctcaggcatgtgtcttaaaacccggcacggtgagtgcgagattaccgccatctctctccagcccggtgagttaaccgtttataacctgcaactcggcgctgactctccgctgcaaaaaaaccaatgtgccctcagtactttttatgctaacggcgtgttggtcggtgacgcgctggttcaacatctctatgaagacgaatatcaccaacgcccaaaaaacgtgctgaaaacgttacccgacgagtggcaccaggattaccacaatatgatcaatgcagcgggcgaataa

SEQ ID NO: 577 - DNA, 1608 bp, Serratia marcescens
atgctcgcaaaagattatacgtcagatgagaaacgcatcgtaaaaaacgttatcgaccgatacgagaacagcggcgtatttcttatcgagccaggcgatccggttttaaccgaattttatgatattcaattaaaactggccggcgtcaccgcagccgccgcaccgcaattcagccaactttggcagcagacgaaacgcgtcaaacgggtagcgggccggatgagcgaggccaacaccagcggcgctcagccggtgtacagcatcgtcaggctggattccaccgacggtaaacgttatcaaacagacgccatcggctctctgccggttcaggcgaccaatgtgacgcaaaccctcggcctgttcgacggcggcgccgataacgtcggcaaggtggaatacaaaagcgactacgtttacacggcggactgcaccatcggtgccagcggtgactatccgcaaagccagaccggcggcagctttccggttacggtgatctataccttcgcgcaaacggtcggccagcaaaccgtttacggcgccgaaatcgtcacgacgcaaagctacccgaaagaaatgatcaatgattcccccaggaatctatataaccagcgcatgatcaagatttgcctgacgcgtgacgatggcgactgtgattatcgcaccggctacgatcaggacggcacggttaaagtgccgataaaaggcaatatcacctattttggcaatattgatctcagcaatggcaagccggtcaacgccagcaatactatttatcttatccgcacccgcgccggcggcgatccgatcaccccttacggcggctataatatttttaattctgccgcaacccgaatcagcgggaataacatcacctgggatcttgactggctgaaattcaaccgcgtcgattttgaatccggcgagatggtttattacgtttttaaaattacgcttgatgtcgaaggccgcagtatcgccgcctttattactaacgcacccaaagaaagcgatccggatcgccgtctgctcaataccgtacaaatcaaaccgatgcagattatttatggctgcctggcagagggtacgttgattttaatgcaggatgggacagaaaagccgatcaatgctctcacggcggatgaattcgttatttgcggcaataaccaccccagacgcattgagaatatcaccacggggcaggagcagcattacattgacattaccgcccgcgaccaggcggcacgtgaatatcgtataaaagccagcctggggcaccctttcgtcaccgcaaacggtatttttctcgcccgtgaattgacctcaggcatgtgtcttaaaacccggcacggtgagtgcgagattaccgccatctctctccagcccggtgagttaaccgtttataacctgcaactcggcgctgactctccgctgcaaaaaaaccaatgtgccctcagtactttttatgctaacggcgtgttggtcggtgacgcgctggttcaacatctctatgaagacgaatatcaccaacgcccaaaaaacgtgctgaaaacgttacccgccgagtggcaccaggattaccacaatatgatcaatgcagcggacgaataa

SEQ ID NO: 578 - DNA, 1608 bp, Serratia marcescens
atgctcgcaaaagattatacgtcagatgagaaacgcatcgtaaaaaacgttatcgaccgatacgagaacagcggcgtatttcttatcgagccagacgatccggttttaaccgaattttatgatattcaattaaaactggccggcgtcaccgcagccgccgcaccgcaattcagccaactttggcagcagacgaaacgcgtcaaacgggtagcgggccggatgagcgaggccaacaccagcggcgctcagccggtgtacagcatcgtcaggctggattccaccgacggtaaacgttatcaaaccgacgccatcggctctctgccggttcaggcgaccaatgtgacgcaaaccctcggcctgttcgacggcggcgccgataacgtcggcaaggtggaatacaaaagcgactacgtttacacggcggactgcaccatcggtgccagcggtgactatccgcaaagccagaccggcggcagctttccggttacggtgatctataccttcgcacaaacggtcggccagcaaaccgtttacggcgccgaaatcgtcacgacgcaaagctacccgaaagaaatgatcaatgattcccccaggaatctgtataaccagcgcatgattaagatttgcctgacgcgtgacgatggcgactgtgattatcgcaccggctacgatcaggacggcacggttaaagtgccgataaaaggcaatatcacctattttggcaatattgatctcagcaatggcaagccggtcaacgccagcaataccatttatcttatccgcacccgcgccggtggcgatccgatcaccccttacggcggctataatatttttaattctgccgcaacccgaatcagcgggaataacatcacctgggatcttgactggctgaaattcaaccgcgtcgattttgaatccggcgagatggtttattacgtttttaaaattacgcttgatgttgaaggccgcagtatcgccgcctttattactaacgcacccaaagaaagcgatccggatcgccgtctgctcaataccgtacaaataaaaccgatgcagattatttatggctgcctggcagagggtacattgattttaatgcaggatgggacagaaaagccgatcaatgctctcacggcggatgaattcgttatttgcggcaataaccaccccaggcgcattgagaatatcaccacggggcaggagcagcattacattgacattaccgcccgcgaccaggcggcacgtgaatatcgtataaaagccagcctggggcaccctttcgtcaccgcaaacggtatttttctcgcccgtgaattgacctcaggcatgtgtcttaaaacccggcacggtgagtgcgagattaccgccatctctctccagcccggtgagttaaccgtttataacctgcaactcggcgctgactctccgctgcaaaaaaaccaatgtgccctcagtactttttatgctaacggcgtgttggtcggtgacgcgctggttcaacacctctatgaagacgaatatcaccaacgcccaaaaaacgtgctgaaaacgttacccgccgagtggcaccaggattaccacaatatgatcaatgcagcggacgaataa

SEQ ID NO: 579 - DNA, 1608 bp, Serratia marcescens
atgctcacaaaagattatacgtcagatgagaaacgcatcgtaaaaaacgttatcgatcggtatgaaaacagcggcgtatttctgattgagcctggtgatccgactctcgttcaattttatgatatccaactcaagctggccggcgttaccccagcggcggcaccgcagttcacccgcctctggcagcagacaaaaagcgccaggcaggtatccggctggctgggcgaggccgacagcaacggcgtccaaccggtctacagcattgtcaggctggattccactgacggcaggcattatcaaaccgacgccatcggttctctgccggtcaaggcgaccaatgtcacccagacgcttggcctgtttaacggcagcgccgataacgtcggcaatgtgtcctataaaagcgactacgtatacacctcagactgcaccatcggcgccagcggtgattatccgcaaagccaaaccagcggcgattttccggtcacggtaatctacacctttgcgcaaacggtcggtcagcaaaccgtttacggcgctgaaatcgtcacgacgcaaagctatcccaaagaaatacgcaatgactcccccagaaatctgtataaccagcagatgataaagatctgcctgacccgcgacgacggcgattgcgattatcgcaccagctacgatcaggacggcacggttaaagtgcccatcaagggcaacatcacttattttggcaagatagacctcaataacggccaggcggtcaatgccaccaacaccatatatctgattcgcacccgcgccggcggcgatcccattaccccactcggcggttataatatcttcaactcaccggcgaccagaatcaatggcgataacatctcctgggatctcaattggctgaaattcaatcgcgtggattttgaatccggcgaacaggtttattatgtttttaaaatcacgctcaatgtggaaggccgcagcatcgccgcatttatcaccaatgcgcccaaggatatcgatcccgatcgccgcatgcttaacacggtgcaaatcaagccgatgcagattatttacggctgcctggcggcagacacattaattaccctgcaggacggcacagaaaaaaccatcgacaccatcgaacccaacgactttgtgctatgtggcaaccatcagccgagaagggttgaaaatatcaccaccgggcaagagcagaattatatcgagataacggcgcagggtggcaacgggcaactatttagcatcacggccagtatggggcaccctttcgtcacggcaagcggcatactgacagcccgtgaattaacggtgggcatgcgcctgaaaacattacacggggagtgtgaggtcaccgccgttttaaataaatccggtgaactgcaggtttataatctgcaattaagcgccgacctgcccttgcaaaaaacacagtgcggcgtcaataccttttacgctaacggcgtactggtcggcgacgcactggtgcagcatctttatgaggatgaatatcatcaacgccctcagaatatcctgcaggcgctgccggccgaatggcatacggatttccacaatatgaacagcagaacgggaaaataa

SEQ ID NO: 580 - DNA, 1590 bp, Serratia proteamaculans
atgatcacacaaggttatacgtcagatgaacagagtgtagtaaaaaatgtcatcggaaaatatagcaacaccggtctgtttattattgatcccgctgaccccttgctggtccgtttttatgacattcaactcaaacttgccggcctcacctcaggttactccccgcagttcacccaatgctggcaagaaacaaaacggctaaagcgcagcggcggccggttgagcgaggccagtaacggatcgtctaaaccggtctacagcattgttcggctggattctaccgacggcagcaattaccgtgctgacgccattggctccttgccggtatccgccgccaacgtaacgcaaaccctgggactgtttgacggtgaagcggttaatgtcggcgcagtgaaccacaaccaggcctatgtctatgccgcagactgcaccctcagcgccaatggggtttatccagctagccagatcgctaccgattacccggtcacggtgatttatacctttgcccagacgattgacagagacacgatatacggcgcagaaattatcaccacgcagagttaccccaaggatatttacaatgagtcgcctcgaagtattatcaacccaaatgaaataaagatttgtttaacccgagatgaacccgactgcgactaccgtaatacctatgacggttcggtcagagtacctatcaaagggaatattacctatctgggtcagattgaacttagtggtggccagccggttaaagccagtaatactatttatctgatccgcacgagggcgggtggagaccccgtcacgcctttgggtaattataatattttcaactcccctaacacccgaattaatggcaacaacatttcctgggatctggactggctgaggtttaatcaggtcaattttgattcaggcgaatggatttattatgttttcaaggtcattcttaacgttgaggggaaaagcatagttgcgttcattaccaatgcaccgaaagaaatcgaaccggaccaacgttttttaaataccgtacaattaaaaccaatgcgtatcgtatacggatgcctggcgggtgatagcaaaatactaatgcaggatggcagtgaaaaactgatttccgccatagatatcggtgaaactgtattgtcgaaaaataataatccgctccgcgttgaggctgtcacccgcggacaggaacatcattatctcgagattagcgtgcgcaatagcgcgggtaatataagaaaaatcaccgccagtttagggcaccctttcatcacgccgtctggcgtggtcatagctcgagaattaacctcatccagtaaattaatcaccctggatggcgaaagcgagatcgtcagtattgttcaacagcagggcgatctgaaagtctacaacctgcaactctcctccgacgacgagcactacaccgataactgtctgtatgccaacggcatactggtgggcgatatccagatgcaaagagtctatgaagatgaatatcatcagcgccccgcgaacgttctgagcaaattgccgaaggaatggcatcaggattatcaaaatcatctcgataaagcggggaaataa

SEQ ID NO: 581 - DNA, 1590 bp, Serratia liquefaciens
atgatcacacaaggttatacgtcagatgaacagagtgtagtaaaaaatgtcatcggaaaatatagcaacaccggtctgtttattattgatcccgctgaccccttgctggtccgtttttatgacattcaactcaaacttgccggcctcacctcaggttactccccgcagttcacccaatgctggcaagaaacaaaacggctaaagcgcagcggcggccggttgagcgaggccagtaacggatcgtctcaaccggtctacagcattgttcggctggattctaccgacggcagcaattaccgtgctgacgccattggctccttgccggtatccgccgctaacgtaacgcaaaccctgggactgtttgacggcgaagcggttaatgtcggcgcagtgaaccacaaccaggcctatgtctatgccgcagactgcaccctcagcgccaatggggtttatccagctagccagatcgctaccgattacccggtcacggtgatttatacctttgcccagacgattgacagagacacgatatacggcgcagaaattatcaccacgcagagttaccccaaggatatttacaatgagtcgcctcgaagtattatcaacccaaatgaaataaagatttgtttaacccgagatgaacccgactgcgactaccgtaatacctatgacggttcggtcagagtacctatcaaagggaatattacctatctgggtcagattgaacttagtggtggccagccggttaaagccagtaatactatttatctgatccgcacgagggcgggtggagaccccgtcacgcctttgggtaattataatattttcaactcccctaacacccgaattaatggcaacaacatttcctgggatctggactggctgaggtttaatcaggtcaattttgattcaggtgaatggatttattatgttttcaaggtcattcttaacgttgaggggaaaagcatagttgcgttcattaccaatgcaccgaaagaaatcgaaccggaccaacgttttttaaataccgtacaattaaaaccaatgcgtatcgtatacggatgcctggcgggtgatagcaaaatactaatgcaggatggcagtgaaaaactgatttccgccatagatatcggtgaaactgtattgtcgaaaaataataatccgctccgcgttgaggctgttacccgcggacaggaacatcattatctcgagattagcgtgcgcaatagcgcgggtaatataagaaaaatcaccgccagtttagggcaccctttcatcacgccgtctggcgtggtcatagctcgagaattaacctcatccagtaaattaatcaccctggatggcgaaagcgagatcgtcagtattgttcaacagcagggcgatctgaaagtctacaacctgcaactttcctccgacgacgagcactacaccgataactgtctgtatgccaacggcatactggtgggcgatatccagatgcaaagagtctatgaagatgaatatcatcagcgccccgcgaacgttctgagcaaattgccgaaggaatggcatcaggattatcaaaatcatctcgataaagcggggaaataa

SEQ ID NO: 582 - DNA, 1608 bp, Serratia plymuthica
atgattacgcaaaattatacgtcagatgaaaagagtattgttcaagcggttatcaaccaatatagcaataccggcatatttattattgaaccaggcaatccattattggtcgatttttacgatatccaactaagactggcgggggtcactccgggtgcttcgccgcaattctcccaagtctggcaacaatcgaaacagagtaaacgcactgcaggccggctgagcgaggccggcaacggctacgcccaaccggtctacagcatagtgcggttggactccatcgacggcagaagctatcgtgcggatgccattggctccttgccggtatctgccagcaatgtgacgcagaccctcgggctgtttgacgccgaggcgaccaatgttggccaggtgacatccaacaaggcctacgtttacaccgcagattgcgcaatcactgcgaatggcgattatccgcaaagccagctcaccggtgattttccggtcacggtcatttataccttcgcgcagactattgaccaaaatactttttatggcgcggaaattattactacgcaaagttaccctaaaagcatttacaatgattcaccgcgtagtctttataatcaggacgccataaagatttgtttgacccgtgatgcaccagactgcgactatcgttatagctacgatggcgacggtaccgtcagggtgccgattaaaggcaccatcacctataacggaaaaatagatcttaatgcaggccagccggtaaacgccaagaatgttatttatctgatacgtacccgtgccggcggcgatcccgtaacgccttatggcgatttaaatatttttaactcgcccaacacccaaattaatggcgataccctctcctgggatcttaactggttaaagttcaatcaggttgattttgaatctggcgaatgggtttattatgtattcagagtcaatctgaacgtcgagggcagagacatcgttgcatttattaccaatgcccccaagaaccttgaaccggaccaacgttttttaaataccgcaccgttaaaacccatgtgcatcgtttatggctgcctgggtgagaatacaaaaatcctgatgcaggatggcaacgagaaaatcattaccgacattagcgccggcgaatatatacgaacgcgtaatggccacgcactcaggattgatgccattaccaccgggcatgaacgccattatgttgaaatcactctgagagacaacagtaataaaataaaaaacatcaccgccagccttgggcacccttttatcacatcggcaggtattgtcatggcgcgagaactcaatcacgacagccgggttattacgctggatggcgaggctgacattgtcagcctggtgcaaaaagaaggcgacattaagatttataacctgcaattaccgatagatacgccggtagacaggctgccttacgacaataatacgttctatgccaatggcatattggtcggcgataacctgatgcaaagggtttgtgaggatgaatatcatcggcgaccggtcaatatcctgagcaaactgcctcaagaatggcatcaggattaccaaaaccatctcaatctggcgggtaagtaa

SEQ ID NO: 583 - DNA, 1608 bp, Serratia plymuthica
atgattacgcaaaattatacgtcagatgaaaagagtattgttcaagcggttatcaaccaatatagcaataccggcatatttattattgagccaggcaatccattattggtcgatttttacgatatccaactaagactggcgggggtcactccgggtgcttcgccgcaattctcccaagtctggcaacaatcgaaacagagtaaacgcactgcaggccggctgagcgaggccggcaacggctacgcccaaccggtctacagcatagtgcggttggactccatcgacggcagaagctatcgtgcggatgccattggctccttgccggtatctgccagcaatgtgacgcagaccctcgggctgtttgacgccggggcgaccaatgttggccaggtgacatccaacaaggcctacgtttacaccgcagattgcgcaatcactgcgaatggcgattatccgcaaagtcagctcaccggtgattttccggtcacggtcatttataccttcgcgcagactattgaccaaaatactttttatggcgcggaaattattactacgcaaagttaccctaaaagcatttacaatgattcaccgcgtagtctttataatcaggacgccataaagatttgtttgacccgtgatgcaccagactgcgactatcgttatagctacgatggcgacggtaccgtcagggtgccgattaaaggcaccatcacctataacggaaaaatagatcttaatgcaggccagccggtaaacgccaagaatgttatttatctgatacgcacccgtgccggcggcgatcccgtaacgccttatggcgatttaaatatttttaactcgcccaacacccaaattaatggcgataccctctcctgggatcttaactggttaaagttcaagcaggttgattttgaatctggcgaatgggtttattatgtattcagagtcaatctgaacgtcgagggcagaaacatcgttgcatttattaccaatgcccccaagaaccttgaaccggatcaacgttttttaaataccgcaccgttaaaacccatgtgcatcgtttatggctgcctgggtgagaatacaaaaatcctgatgcaggatggcaacgagaaaatcattaccgacattagcgccggcgaatatatacaaacacgtaatggccacgcactcaggattgatgccattaccaccgggcatgaacgccattatgttgaaatcactctgagagacaacagtaataaaataaaaaacatcaccgccagccttgggcacccttttatcacatcggcaggcattgtcatggcgcgagaactcaatcacgacagccgggttattacgctggatggcgaggctgaaattgtcagcctggtgcaaaaagaaggcgacattaaggtttataacctgcaattaccgatagatacgccggtagacaggctgccttacgacaataatacgttctatgccaatggcatagtggtcggcgataacctgatgcaaagggtttgtgaggatgaatatcatcggcgaccggtcaatatcctgagcaaactgcctcaagaatggcatcaggattaccaaaaccatctcaatctggcgggtaagtaa

SEQ ID NO: 584 - DNA, 1608 bp, Serratia plymuthica
atgattacgcaaaattatacgtcagatgaaaagaatatcgttaaagcggttatcaatcggtatagcaataccggcatatttattattgaaccaggcaatccattattggtcgatttttacgatatccaactaagacttgcgggggtcactccgggtgcttcgccgcaattctcccaagtctggcaacaatcgaaacagagtaaacgcactgcaggccggctgagcgaggccggcaacggctacgcccaaccggtctacagcatagtgcggttggactccatcgacggcagaagctatcgtgcggatgccattggctccttgccggtatctgccagcaatgtgacgcagaccctcgggctgtttgacgccgaggcgaccaatgttggccaggtgacatccaacaaggcctacgtttacaccgcagattgcgcaatcactgcgaatggcgattatccgcaaagccagctcaccggtgattttccggtcacggtcatttataccttcgcgcagactattgaccaaaataccttttatggcgcggaaattattactacgcaaagttaccctaaaagcatttacaatgattcaccgcgtagtctctataatcaggacgccataaagatttgtttgacccgtgatgcgccagactgcgactatcgttatagctacgatggcgacggtaccgtcagggtgccgattaaaggcaccatcacctataacggaaaaatagaccttaatgcaggccagccggtaaacgcaaagaatgttatttatctgatacgcacccgtgccggcggcgatcccgtaacgccttatggcgatttaaatatttttaactcgcccaacacccaaattaatggcgataccctatcctgggatcttaactggttaaagttcaagcaggttgattttgaatctggtgaatgggtttattatgtattcagagtcaatctgaacgtcgagggcagaaacatcgttgcatttattaccaatgcccccaagaaccttgaaccggatcaacgttttttaaataccgcaccgttaaaacccatgtgcatcgtttatggctgcctgggtgagaatacaaaaatcctgatgcaggatggcaacgagaaaatcattaccgacattagcgccggcgaatatatacaaacgcgtaatggccacgtactcaggattgatgccattaccaccgggcatgaacgccattatgttgaaatcactctgagagacaacagtaataaaataaaaaacatcaccgccagccttgggcacccttttatcacatcggcaggcattgtcatggcgcgagaactcaatcacgccagccgggttattacgctggatggcgaggctgaaattgtcagcctggtgcaaaaagaaggcgacattaaggtttataacctgcaattaccgatagatacgccggtagacaggctgccttacgacaataatacgttctatgccaatggcatattggtcggcgataacctgatgcaaaggatttgtgaggatgaatatcatcggcgaccggtcaatatcctgagcaaattgcctcaagaatggcatcaggattaccaaaaccatctcaatctggcgggtaagtaa

SEQ ID NO: 585 - DNA, 1608 bp, Serratia plymuthica
atgatcacgcaagattatacttccgatgaaaagactattgttaaagcggttatcaaccggtatagcaataccggcatatttattattgaacccggcaatccattattggtctatttttacgatatccagttaagattggcggggatcactccaggcgtttcaccgcaattcacgcaacgctggcaacaatcgaaacagagtaaaggtacggcaggccgactgagcgaggccggcaacggcgacgcccagcctgtttacagtatcgtaaggttggactccctcgacggcagaagctatcgcgcggatgccattggctccctgccggtttccgccaccaatgtgacgcaaacgctgggtttgtttgacacggaggcaaccaatgttggccaggtgacatccaacaaggcctatatttacaccgcagattgcgccattacggcgaatggcgattatccgcaaagccagctcaccgacgattttccggtcacggtcatttatacctttgcgcaaaccattgaccaaagtactttttatggtgcagaaatcattactacgcaaagctaccctaaaagtatttacaatgattcaccgcgcagcctctataaccaggatgcaataaaaatttgtttaacgcgtgatgctgccgattgcgactatcgttatacttacgatggcgacggtacggtaagggttcccattaaaggcaatatcacttattacggtaaaatagacatagttgacggtcggcctgtcaatgccaaaaatattatttatcttatacgcacgcgcgccggcggcgacccggtgacaccctatgatgatttaaatatcttcaactcccccaacactaaaattaatgacgataccttatcctgggatttaaattggttaaagttcaagcaggttgattttgagtctggtgaatgggtttattatgtattcagagtcaatctgaacgtcgagggccgaaatattgtcgcgtttattaccaacgcaccaaaaaacattgagccggaccagcgctttttaaatacggcacctttaaaacccatgtgcattgtttacggttgcctgggagagaacaccaaaatactgatgcaggatggtaacgagaaaaccattgccaatatcagcaccggcgaatatatacgcacgcgcaatggtcgcacgctcagagttgatgccatcaccaccggatatgagtgccattatgttgaaatcacagtgcaagacaccaacaataaaacacgcactattatcgccagtctgggtcacccttttattacgtcatcgggcgttgtcctcacacgtgaattgtgtcagaccagtaaacttcttacgctggatggcgaagctgaaattatcagcatggtgcaaaaagacggcaacattaaggtttataacctgcaattaccgatagatacgccggcaaacacggcgccttacgataataatacgttctacgccaacggaattttggtcggggataacctgatgcaaagggtttatgaggatgaatatcatcaacgaccggtcaatatcttgagcaaactgcctcaggaatggcatcaggattaccacaatcatctcaacctggcgggtaaataa

SEQ ID NO: 586 - DNA, 1602 bp, Serratia proteamaculans
atgatcactcaaggttatacgtcagatgagaagactattgttaaaaatgtcatcagcaaatatagcaatgccggtctgtttattattgaacccggcgatcccttgctggtcagcttttacgatattcaattaaaacttgccggtcttaccccgggtaatactccgcagtttactcaatgctggcaacaggcaaaacggcttaaactcagtgccggccggttgagcgatgccggtaatggctctgctcaaccggtatacagcattgtccggctggactctaccgacggtcgaaattatcgtgccaatgccataggttccctgcctgtctcggcgacaaacgtaacgcagacccttgggctgtttgacggcgaagccgccaatgtagggccggttaactacaaccaggcctatgtctacgccgcagactgcgccctgagtgccgatggggtttatccgggtagccagattgctgcagattatccggtcacggtgatttatacctttgcacagactatcggtaaccagacggtgtacggggcagagatcattaccagccagagttatccaaaaaatatctataatgagtcaccgcggagtcttattaatccaaatgaaatcaagatctgcctgacccgcgatgaggccgactgtgactaccgtaataattatgacggttcggtcagggtgcctattaaaggcaatattacctacctggggcaaattgagctcaacggtggtcagcctgttaaagccagcaataccatttatttgatacggactcgtgccggcggcgatcctgtcacccctttcggtaactacaatattttcaactcggccaacacccgaatcattggtgacaatatctcctgggatctggactggctcaggttcaatcaggttgactttgactccggcgagtggatttattatgtattcaaagtcattctcaatgtcgatggaaaaagcattgcgacctttatcaccaacgcacctaaaagccttgagccagaccagcgtttcttaaatactgagctattaaaacccatgcgtattgtttatggctgcctggctgaaaacacaagaattctgatgcaggacggtggtgaaaaattaatttccgacctgactatcggagaatacgtattatcgagaaacaatatcccgctcagaattgaagctatcactaatggccaggagcgcaatttcatcgaaataaccacacaaaacagcaaaggtaaaataagaaccatcaccagcagccttggccacccttttattacctcaaccggtgtagtgattgctcgcgaattgaatcacacctctaaattaatcaccctggagggtgagtgcgaaattataagcattgaacaacagcaaggagaactgaaggtatataacctgcagctgacggctgaagcgcccgttgataaaggtctgtacgatgacaacaccctgtatgccaacggtatattggtcggtgacctccagatgcaacgtatctatgaggacgaatattaccagcgtccggtgaatatcctgagcaaactgccaaaagaatggcatcaggattatcaaaaccatctcaacgcggcgggtaaataa

SEQ ID NO: 587 - DNA, 1608 bp, Serratia plymuthica
atgattacgcaaaattatacgccatatgaaaagagtattgttcaagcggttatcaaccagtatagcaataccggcatatttattattgaaccaggcaatccattattggtcgatttttacgatatccaactaagacttgcgggggtcactccgggtgcttcgccgcaattctcccaagtctggcaacaatcgaaacagagtaaacgcaccgcaggccggctgagcgaggccggcaacggctacgcccaaccggtctacagcatagtgcggttagactccatcgacggcagaagctatcgcgcagatgccattggctccttgccggtttctgccagcaatgtgacgcagaccctcgggctgtttgacgccgaggcgaccaatgttggtcaggtgacatccaacaaggcctacgtttacaccgcagattgcgcaatcactgcgaatggcgattatccgcaaagccaactcaccggtgattttccggtcacggtcatttataccttcgcgcagactattgaccaaaataccttttatggcgcggaaattattactacgcaaagttaccctaaaagcatttacaatgattcaccgcgcagtctctataaccaggacgccataaagatttgtttaacccgtgatgcgccagactgcgactatcgttatagctacgatggcgacggtaccgtcagggtgccgattaaaggcgccatcacctataacggaaaaatagaccttaatgccggccagccggtaaacgcaaagaatgttatttatctgatacgcacccgtgccggcggcgatcccgtaacgccttatgacgatttaaatatttttaactcgcccaacacccaaattaatggcgataccctctcctgggatcttaattggttaaagttcaaacaggttgattttgaatctggcgaatgggtttattatgtattcagagtcaatctgaacgtcgagggcagaaacatcgttgcatttattaccaatgcccccaagaaccttgaaccggaccaacgttttttaaataccgcaccgttaaaacccatgtgcattgtttatggttgcctgggtgagaatacaaaaatcctgatgcaggatggcaacgagaagatcattgccgacattagcgccggcgaatatatacgaacgcgtaatggccatgcactcaggattgatgccattaccaccgggcatgaacgccattatgttgaaatcactctgagagacaacggcaataaaataaaaaacatcaccgccagccttgggcacccttttatcacatcggcaggcattgtcatggcgcgggaactcaatcacgccagccgggttattacgctggatggtgaggctgaaattgtcagcctggtgcaaaaagaaggcgacattaaggtttataacctgcaattaccgatagatacgccggtagacagggtgccttacgacaataatacgttctatgccaatggcatattggtcggcgataacctgatgcaaaggatttgtgaggatgaatatcatcggcgaccggtcaatatcctgagcaaactgcctcaagaatggcatcaggattaccaaaaccatctcaatctggcgggtaagtaa

SEQ ID NO: 588 - DNA, 1608 bp, Serratia plymuthica
atgattacgcaaaattatacgccatatgaaaagagtattgttcaagcggttatcaaccagtatagcaataccggcatatttattattgaaccaggcaatccattattggtcgatttttacgatatccaactaagacttgcgggggtcactccgggtgcttcgccgcaattctcccaagtctggcaacaatcgaaacagagtaaacgcaccgcaggccagctgagcaaggccggcaacggctacgcccaaccggtctacagcatagtgcggttagactccatcgacggcagaagctatcgtgcggatgccattggctccttgccggtttctgccagcaatgtgacgcagacccttgggttgtttgacgccgaggcgaccaatgttggccaggtgacatccaacaaggcctacgtttacaccgcagattgcgcaatcactgcgaatggcgattatccgcaaagccagctcaccggtgattttccggtcacggtcatttataccttcgcgcagactattgaccaaaataccttttatggcgcggaaattattactacgcaaagttaccctaaaagcatttacaatgattcaccgcgcagtctctataaccaggacgccataaagatttgtttaacccgtgatgcgccagactgcgactatcgttatagctacgatggcgacggtaccgtcagggtgccgattaaaggcgccatcacctataacggaaaaatagaccttaatgccggccagccggtaaacgcaaagaatgttatttatctgatacgcacccgtgccggcggcgatcccgtaacgccttatgacgatttaaatatttttaactcgcccaacacccaaattaatggcgataccctctcctgggatcttaattggttaaagttcaaacaggttgattttgaatctggcgaatgggtttattatgtattcagagtcaatctgaacgtcgagggcagaaacatcgttgcatttattaccaatgcccccaagaaccttgaaccggaccaacgttttttaaataccgcaccgttaaaacccatgtgcattgtttatggttgcctgggtgagaatacaaaaatcctgatgcaggatggcaacgagaagatcattgccgacattagcgccggcgaatatatacgaacgcgtaatggccatgcactcaggattgatgccattaccaccgggcatgaacgccattatgttgaaatcactctgagagacaacggcaataaaataaaaaacatcaccgccagccttgggcacccttttatcacatcggcaggcattgtcatggcgcgggaactcaatcacgccagccgggttattacgctggatggtgaggctgaaattgtcagcctggtgcaaaaagaaggcgacattaaggtttataacctgcaattaccgatagatacgccggtagacagggtgccttacgacaataatacgttctatgccaatggcatattggtcggcgataacctgatgcaaaggatttgtgaggatgaatatcatcggcgaccggtcaatatcctgagcaaactgcctcaagaatggcatcaggattaccaaaaccatctcaatctggcgggtaagtaa

SEQ ID NO: 589 - DNA, 1608 bp, Serratia plymuthica
atgattacgcaaaattatacgccatatgaaaagagtattgttcaagcggttatcaaccagtatagcaataccggcatatttattattgaaccaggcaatccattattggtcgatttttacgatatccaactaagacttgcgggggtcactccgggtgcttcgccgcaattttcccaagtctggcaacaatcgaaacagagtaaacgcaccgcaggccggctgagcgaggccggcaacggctacgcccaaccggtctacagcatagtgcggttagactccatcgacggcagaagctatcgcgcagatgccattggctccttgccggtttctgccagcaatgtgacgcagaccctcgggctgtttgacgccgaggcgaccaatgttggccaggtgacatccaacaaggcctacgtttacaccgcagattgcgcaatcactgcgaatggcgattatccgcaaagccaactcaccggtgattttccggtcacggtcatttataccttcgcgcagactattgaccaaaataccttttatggcgcggaaattattactacgcaaagttaccctaaaagtatttacaatgattcaccacgcagtctctataaccaggacgccataaagatttgtttaacccgtgatgcgccagactgcgactatcgttatagctatgatggcgacggtaccgtcagggtgccgattaaaggcgccatcacctataacggaaaaatagaccttaatgccggccagccggtaaacgcaaagaatgttatttatctgatacgcacccgtgccggcggcgatcccgtaacgccttatggcgatttaaatatttttaactcgcccaacacacaaattaatggcgataccctctcctgggatcttaattggttaaagttcaagcaggttgattttgaatctggcgaatgggtttattatgtattcagagtcaatctgaacgtcgagggcagaaacatcgttgcatttattaccaatgcccccaagaaccttgagccggaccaacgttttttaaataccgcaccgttaaaacccatgtgcatcgtttatggttgcctgggtgagaatacaaaaatcctgatgcaggatggcaacgagaagatcattgccgacattagcgccggcgaatatatacgaacgcgtaatggccacgcactcaggattgatgccattaccaccgggcatgaacgccattatgttgaaatcactctgagagacaacggcaataaaataaaaagcatcactgccagccttgggcacccttttatcacatcggcaggcattgtcatggcgcgagaactcaatcacgccagccgggttattacgctggatggcgaggctgaaattgtcagcctggtgcaaaaagaaggcgacattaaggtttataacctgcaattaccgatagatacgccgggatacagtgtgccttacgacaataatactttctatgccaatggcatattggtcggcgataacctgatgcaaagggtttgtgaagatgaatatcatcggcgaccggtcaatatcctgagcaaactgcctcaagaatggcatcaggattaccaaaaccatctcaatctggcgggtaagtaa

SEQ ID NO: 590 - DNA, 441 bp, Haemophilus piscium
atgaatgcaatcacagacaccaagaccggcctcttcctcgcctctttcgagattggcaaagccatgccgggagcacaactgctgcacctgaacctggccgtctataccccgggggagacggtgaacggcgtcgctcacctgacccaggcaaccaatccaccgctggacatggcctccgaactgaagggccagtacacctatatgtgtgtcatgcccaagctgtgccatatcctggtaaccgcccagggttatcccatcatcaagtggccgcagggtggcgggatcggccccgtgatccagcccaacttcgagctgcgcatggtgctcagcgaagactggaagtcaggcacggccaactacaagtaccaggacagccaccaggtgtggcacgaggtgaaagacgcccccgtcaacctggtccccgccgccgtactggcttga

SEQ ID NO: 591 - DNA, 1110 bp, Aeromonas salmonicida
atgaccacaatcaccacactggatctcggggatcaaggcctgctggcagcctacctgtctgcggcctcaccggccctgctcaaccagagctatgccaatctgctgctgatgcagcagtccctggccaggagtgagctcgactcatccctggcagtcaagattgaggcctaccaggcccagatgctcaaccaggcgcgctactaccagcaagacaacctgcctggccttatccatctgatgagctatggctcgaatttctacgccctggtcgcggccttcaaccgcttgctcggccaggatgacgatgcggccgtgctggccgggcgaaccaagctggcagagcagctgacctcgctggccgatcaggcccggagttaccagctcttggcccagacgctcaacacccgggttcaggtcgcctggggttcgctgcgtcccctgatggacaacttcctgggggtgatcactcagctcgagcaggatctgatcgccgatgcccagcgccaggccaaggccatagacgcactgaaccaggccatagcggcaaacattcaggccattgtcgatgagggtggcaaggccggtgagggtgtcagccaactgggccacgctatcgtgacctcgctggcactggaggaaaaacccgccgccaagcctgccgctagccaaggcacggccaagggatcagaccagcagacccaatacatgatcgccggtatccaggccctgtcatccggcatagccggtgccagcctggcggccaaggagctcaaggccaatacccagaaactggcccaggcctaccaggcactggccgagaccaacgccatgctgacggtcgcaaagtcggtgcaggcccagaaccagctgtttgtcagcacctacgagacggtagcccgggcgatcaccggcctgccctcgggctggcagaaggtggccgacgcctatcagagcgccgttcccatagtggccgacctcagcaacgacggcgatgtgcgtctgctcaggcgcaccctggcgctggatacccaatcctggcaactgctctccgatcaggtgaatgacatcaagaccgcctacgccggcaacggcgtactgcccgatgcttaa

SEQ ID NO: 592 - DNA, 1077 bp, Aeromonas salmonicida
atgataaatgcaaccatttccatggatcagagcatggccggtcaggccggtcaggcgctgcagatccagacctattgcaacagcgtcaagcaacaggtgtccgtggatttcagccagttcccgaacctcaaggacaaccagacccagatcaaccagggactggacgtcgccaaagggcatgcggacctgtacctcaaccagatccagccgcagatcatcaccaatatcagcaacatctccaactactacgccctgcaaaatgccatcccgaccgtgcttcctcccggttccaccaaggcccagtggctcaggcagttgaacgtcatcaaggaacaggccaccgagtaccacaaggtatcctccgacacccgccttattatcctggatctcaacaacaacctgatcaccgactcccgcaacttccagggcatagtggtgaacctcaacagcaaggtgcagggtgacaacggggtgctggctcagctcaacggtgacatcgacaaggtcaacgcggccatcgacggcgccatcgccggcatagtggttgggggcttgctggtgattggcggcgccttcgtcactgccataggcgcagtggccgacttcgtcaccgccggcacctcgacacctgtggtaataggtggcgtcgccatgatggtggcaggcgccgccggtatcacggcaggctccatagtgctgcacaactcgctgggcgcccgccaggatctgtaccagaagcgcagcaacctcaacagcgaggttctgatcgccacccagatcggcaatggttataaagggctccaggtacaggctcaaaacgcggtcaatgccgcgacccagatgagcaatgcctgggacgccctgacctcggatctcggcagcctgatcacggatctggacaagggcatcaccagcggcgacgacatccgccagctctggttgaccgccgccgacaccacagtgaagacggtgctcgtcgacgtgaacaccatcaaggcccagatggccggcgtcagccccatgcaagtgcccgcgaccgccaccatagccgatttcgtcggccgtctggccgcctaa

SEQ ID NO: 593 - DNA, 801 bp, Aeromonas salmonicida
atgagcaacggtattctttctcaatccattgccaacatgcagcaggccgaagccgtcattcagtccttcaccggtctgccgcaaaacgccgtcaacatccagcagaacgtcgaggaggtggtcgcggcgctgctgcccctggtgcaaaccatgcagcagcaggtactggcgtttggtgcgcgcctggaggtgcaactgacacagcagctggccaataccggccccttcaacccagaggcgctcaaggcattcgtcgatctggtccagcaggagatcgcccccatccagacgctgaccgcccagaccctgaccgccagccagacggccaacgatcgcatcacgcaagacaacatagcgttgcaacggatcggcgtggagctgcaagccaccatagccggactacaatccaacctggccggggcccgtcaggagctggactccctcaacaagaaaaaactctacctgctggggctgggattgctggggttgccgggcctcatcgccctggccgtcaccctgacgcaaacccagaacaaggtgaacagtctggagggacaggtgaaccagattgaggggcagatccagcgtcagcaaggctttctcggccagacgacggccttctcccagcaattcggttccctcatcgatcgggtgagcaaggtcggcaacaccatcaccctgctcggcggcgatattgccaacgtcgcccgcgatgccgggcaaggggatcctgagctggcgcggctcttcttcaccgccgccctcaccgaggttcgcaccctgcaggtggacgcctcctga

SEQ ID NO: 594 - DNA, 1107 bp, Aeromonas salmonicida
atgaccacaatcaccacactggatcttggggatcaaggcctgctggcagcctacctgtctgcggcctcaccggccctgctcaaccagagctatgccaatctgctgctgatgcagcagtccctggccaggagtgagctcgactcatccctggcagtcaagattgaggcctaccaggcccagatgctcaaccaggcgcgctactaccagcaagacaacctgcctggccttatccatctgatgagctatggctcgaatttctacgccctggtcgcggccttcaaccgcttgctcggccaggatgacgatgcggccgtgctggccgggcgagccaagctggcagaacagctgacctcgctggccgatcaggcccggagttaccggctcttggcccagacgctcaacacccgggttcaggtcgcctggggttcgctgcgtcccctgatggagaacttcctgggggtgatcactcagctcgagcaggatctgatcgccgatgcccagcgccaggccaaggccatagacgcactgaatcaggccatagcggcaaacattcaggccattgtcgatgagggtggcaaggccggtgagggtgtcagccaactgggccacgctatcgtgacctcgctggcgctggaggaaaaacccgccgccaagcctgccgctagccaaggcacggccaagggatcagaccagcagacccaatacatgatcgccggtatccaggccctgtcatccggcatagccggtgccagcctggcggccaaggagctcaaggccaatacccagaaactggcccaggcctaccaggcgctggccgagaccaacgccatgctgacggtcgcaaagtcggtgcaggcccagaaccagctgtttgtcagcacctacgagacggtagcccgggcgatcaccggcctgccctcgggctggcagaaagtggccgacgcctatcagagcgccgtccccatagtggcagacctcagcaacgacggcgatgtgcgtctgctcaggcgcaccctggcgctggatacccaatcctggcaacagctctccgatcaggtgaatgacatcaagaccgcctacgccggcaacggcgtcctgcccgatgct

SEQ ID NO: 595 - DNA, 1107 bp, Aeromonas salmonicida
atgaccacaatcaccacgctggatctcggggatcaaggcctgctggcagcctacctgtctgcggcctcaccggccctgctcaaccagagctatgccaatctgctgctgatgcagcagtccctggccaggagtgagctcgactcatccctggcagtcaagattgaggcctaccaggcccagatgctcaaccaggcgcgctactaccagcaagacaacctgcctggccttatccatctgatgagctatggctcgaatttctacgccctggtcgcggccttcaaccgcttgctcggccaggatgacgatgcggccgtgctggccgggcgagccaagctggcagagcagctgacctcgctggccgatcaggcccggagttaccggctcttggcccagacgctcaacacccgggttcaggtcgcctggggttcgctgcgtcccctgatggagaacttcctgggggtgatcactcagctcgagcaggatctgatcgccgatgcccagcgccaggccaaggccatagacgcactgaatcaggccatagcggcaaacattcaggccattgtcgatgagggtggcaaggccggtgagggtgtcagccaactgggccacgccatcgtgacctcgctggtgctggaggaaaaacccgccgccaagcctgccgctagccaaggcacggccaagggatcagaccagcagacccaatacatgatcgccggtatccaggccctgtcatccggcatagccggtgccagcctggcggccaaggagctcaaggccaatacccagaaactggctcaggcctaccaggcgctggccgagaccaacgccatgctgacggtcgcaaagtcggtgcaggcccaaaaccagctgtttgtcagcacctacgagacggtagcccgggcgatcaccagcctgccctcgggctggcagaaggtggccgacgcctatcagagcgccgtccccatagtggccgatctcagcaacgacggcgatgtgcgtctgctcaggcgcaccctggcgctggatacccaatcctggcaactgctctccgatcaggtgaatgacatcaagaccgcctacgccggcaacggcgtcctgcccgatgct

SEQ ID NO: 596 - DNA, 1107 bp, Haemophilus piscium
atgaccacaatcactacgctggatctcggggatcaaggcctgctggcagcctacctgtctgcggcctcgccggccctgctcaaccagagctatgccaatctgctgctgatgcagcagtccctggccaggagtgagctcgactcatccctggcagtcaagattgaggcctaccaggcccagatgctcaaccaggcacgctactaccagcaagacaacctgcctggccttatccatctgatgagctatggctcgaatttctacgccctggtcgcagccttcaaccgcttgctcggccaggatgacgatgcggccgtgctggccgggcgagccaagctggcagagcagctgacctcgctggccgatcaggcccggagttaccggctcttggcccagacgctcaacacccgggttcaggtcgcctggggttcgctgcgtcccctgatggacaacttcctgggggtgatcactcagctcgagcaggatctgatcgccgatgcccagcgccaggccaaggccatagacgcactgaaccaggccatagcggcaaacattcaggccattgtcgatgagggtggcaaggccggtgagggtgtcagccaactgggccacgctatcgtgacctcgctggcgctggaggaaaaacccgccgccaagcctgtcgctagccaaggcacggccaaggggccagaccagcagacccaatacatgatcgccggtatccaggccctgtcatccggcatagccggtgccagcctggcggccaaggagctcaaggccaatacccagaaactggctcaggcctaccaggcgctggccgagaccaacgccatgctgacggtcgcaaagtcggtgcaggcccagaaccagctgtttgtcagcacctacgagacggtagcccgggcgatcaccggcctgccctcgggctggcagaaggtggccgacgcctatcagagcgccgtccccatagtggccgacctcagcaacgacggcgatgtgcgtctgctcaggcgcaccctggcgctggatacccaatcctggcaactgctctccgatcaggtgaatgacatcaagaccgcctacgccggcaacggcgtcctgcccgatgct

SEQ ID NO: 597 - DNA, 1116 bp, Aeromonas hydrophila
atgaccacgatcgccaccctggatctgggggatcaaggtctgctggccgcctacctgtccgcgacctcacccgccctgctcaaccagacctatgcgaacttgctgttgatgcagcagtccttggccaacagcgagatcgactccaccctcgcggtaaaaatcgaggcctaccaggcccagatgatgaatcaggcacgctattaccagcagaccaacctgtccggtcttatccacctgctgagcaacggctccaacttctacgccctggtcgccgcgttcaaccgcctgctgggtcaggaagacgacgccgccgttctcgcgggcggggcccggctgggacagcaactgacgtccctcgtcgatcaggcccagagctaccggctcaatgcccaggcactcaatgcccgcgtgcaggtggcctggggctccctgcgccccctgatgacccagttcaacggcgtcatcacccagctcgagcaggatctgatggccgacgccaagcgtcagaccgagatcattgacgccctcaaccaggctatcgccgccaatatccaggcgatcgtcgatgagggcggcaaggccggtgaaggggtcaaccagctgggacgggccatcgtcacctcgctgacgctggagcagaaaccggccgacaagggagccaaacctgccacgtcgcaggagatagccaaagagaccgatcagcagacccagtacatgatctccggcctcgaggcgctctcctcaggcatcgcaggctccagccaggcggcccgcgagctcaagaccaacaccgacaagctggcccaggcctatcaggcgctggccgccaccaacaccctgctgagcgtggccaagtcggttcaggcgcaaaaccagctgtttgtcgacacctacagccgggttgccgacaccgtcacccagttgcccgcaggctggcagaaggtggccgacgcctatcaaggggccgtgcccgtggtcactgacctcaacagccccgacgacgtacgccagctgcggcgcaccgtggcgctcaacacccagtcctggcagttgctctcgagccaggttgacgacatcaaggcagcctacgccggcaacggcatcctgcccgacgct

SEQ ID NO: 598 - DNA, 1116 bp, Aeromonas hydrophila
atgaccacgatcgccaccctggatctgggggatcaaggtctgctggccgcctacctgtcggcgacctcacccgccctgctcaaccagacctatgcgaacttgctgttgatgcagcagtccttggccaacagcgagatcgactccaccctcgcggtaaaaatcgaggcctatcaggcccagatgatgaaccaggcacgctattaccagcagaccaacctgtccggtcttatccacctgctgagcaatggctccaacttctacgccctggtcgccgcgttcaaccgcctgctgggtcaggaagatgacgccgccgttctcgcgggcggggcccggctgggacagcaactgacgtccctcgtcgatcaggcccagagctaccggctcaatgcccaggcgctcaatacccgagtgcaggtggcctggggctccctgcgccccctgatgacccagttcaacggcgtcatcacccagctcgaacaggatctgatggccgacgccaagcgtcagaccgagatcattgacgccctcaacaaggctatcgccgccaatatccaggcgatcgtcgatgagggtggcaaggccggtgaaggggtcaaccagctgggacgggccatcgtcacctcgctgacgctggagcagaaaccggccgacaaggggggcaaacccgccacgtcgcaggagatagccaaagagaccgatcagcagacccagtacatgatctccggcctcaaggcgctctcctcaggcatcgctggctccagccaggcggcccgcgagctcaagaccaacaccgacaagctggcccaggcctatcaggcgctggccgccaccaacaccctgctgagcgtggccaagtcggtgcaggcgcaaaaccagctgtttgtcgacacctacagccgggttgccgacaccgtcacccagttgcccgcaggctggcagaaggtggccgacgcctatcaaggggccgtgcccgtggtcactgacctcaacagcctcgacgacgtacgccagctgcggcgcaccgtggcgctcaacacccagtcctggcagctgctctcgagccaggttgacgacatcaaggcagcctacgccggcaacggcattctgcccgacgct

SEQ ID NO: 599 - DNA, 1116 bp, Aeromonas hydrophila
atgaccacgatcgccaccctggatctgggggatcaaggtctgctggccgcctacctgtcggcaacctcacccgccctgctcaaccagacctatgcgaacttgctgttgatgcagcagtccttggccaacagcgagatcgactccaccctcgcggtaaaaatcgaggcctaccaggcccagatgatgagtcaggcacgctattaccagcagaccaacctgtccggtcttatccacctactgagcaacggctccaacttctacgccctagtcgccgcgttcaaccgtctgcttggtcaggaagacgacgccgccgttctcgcgggcggggcccggctgggactgcaactgacgtccctcgtcgatcaggcccagagctaccggctcaatgcccaggcactcaatacccgcgtgcaggtggcctggggctccctgcgccccctgatgacccagttcaacggcgtgatcacccagctcgagcaggatctgatggccgacgccaagcgtcagaccgagatcattgacaccctcaacaaggctatcgccgccaatatccaggcgatcgtcgatgagggtggcaaggccggtgaaggggtcaaccagctgggacgggccatcgtcacctcgctgacgctggagcagaaaccggccgacaagggggccaaacccgccacgtcgcaggagatagccaaagagaccgatcagcagacccagtacatgatctccggcctcgaggcgctctcctcaggcatcgctggctccagccaggcggcccgcgagctcaagaccaacaccgacaagctggcccaggcctatcaggcgctggccgccaccaacaccctgctgaccgtggccaagtcggtgcaggcgcaaaaccagctgtttgtcgacacctacagccgggttgccgacaccgtcacccagttgcccgcaggctggcagaaggtggccgacgcctaccaaggggccgtgcccgtggtcactgacctcaacagccccgacgacgtacgccagctgcggcgcaccgtggcgctcaacacccagtcctggcagttgctctcgagccaggttgacgacatcaaggcagcctacgccggcaacggcatcctgcccgacgct

SEQ ID NO: 600 - DNA, 1167 bp, Aeromonas hydrophila
atgttcccccgccagcccgctcgccgacaccgcgatggagaccatgtcatgaccacgatcgccaccctggatctgggggatcaaggtctgctggccgcctacctgtcggcgacctcacccgccctgctcaaccagacctatgcgaacttgctgttgatgcagcagtccttggccaacagcgagatcgactccactctcgcggtaaaaatcgaggcctatcaggcccagatgatgaatcaggcacgctattaccagcagaccaacctgtccggccttatccacctgctgagcaacggctccaacttctacgccctggtcgccgcgttcaaccgcctgctgggtcaggaagacgacgccgccgttctcgcgggcggggcccggctgggacagcaattgacgtccctcgtcgatcaggcccagagctaccggctcaatgcccaggcactcaatacccgcgtgcaggtggcctggggttccctgcgccccctgatgacccagttcaacggcgtcatcacccagctcgagcaggatctgatggccgacgccaagcgtcagaccgagatcattgacgccctcaacaaagctatcgccgccaatatccaggcgatcgtcgatgagggtggaaaggccggtgaaggggtcaaccagctggggcgggccatcgtcacctcgctgacgctggagcagaaaccggccgacaagggggccaaacccgccacgtcgcaggagatagccaaagagaccgatcagcagacccagtacatgatctccggcctcaaggcgctctcctcaggcatcgctggctccagccaggcggcccgcgagctcaagaccaacaccgacaagctggcccaggcctatcaggcactggctgccaccaacaccctgttgaccgtggccaagtcggtgcaggcgcaaaaccagctgtttgtcgacacctacaaccgggttgccgacaccgtcacccagttgcccgcaggctggcagaaggtggccgacgcctaccaaggggccgtgcccgtggtcactgacctcaacagccccgacgacgtacgccagctgcggcgcaccgtggcgctcaacacccagtcctggcagctgctctcgagccaggttgacgacatcaaggcagcctacgccggcaacggcatcctgcccgacgcttaa

SEQ ID NO: 601 - DNA, 1083 bp, Serratia liquefaciens
atgagtattgatttaagtccgcaagagttattatcattacatatctcaatttcctcccatgctttgcttaatcaaagttacagtaatttgttactgagccaacagctgttaacttcactaagtatggatccgggcctgaccgtgaaaataaaggcctatcagaatcaattaaggcagcaggctcatacatttaaacaaagtaccatgtctgagctgattgggctgtttaccaaggcatcaaacttttccaccctggtcaccaccgtcgacggcatcttttccacggaggacccgcagtcatcccagaaagggggtgaaatggtggcagcactggcgaccgtagctcaaagctaccaggtcgcggcgcaagcggttcatacgcagttcagcgctacaagggaaaccttagagcccctaatgaacaatttcagtgagacagtcagcgccattgaacaggggcttggcgcagaggccaaacagcaggcgcaaaccatcaccgcgcttaatgaagcgattgctaaaaatattcaaggcatcgtggatgctggtatcaaggcaggttccggggtggtacagctgggccaggccattgtcgccgccgtaccgttgggcaccactggcaacaaaccgaaagacccgccacccgccaaacccaaatctgccggtgaccaaaccgaatatatgatctccggcattcaggccatctcagccggggcctccggtgctcatcaggcgattagcgatctgaaggccaactacgtcaagttggcagctgcctatcaggctttggccaccgccaacgcgttgctctccgttgccaagtcggttcacgctcaggcccagctatttgtcgaaacctatgcgcttactgcgcaacgtgtagcgctcttgccagccgagtggaacaaggtggcgaatgcctatctggccgcgactcccgttatacgcgatatcagtgaactttctgatatgaagcaaatcaagcaggttatttcgctcagcgccgatcaatggcagcaaatatcgaaagtcattgagaatgccaaggctaattacgctggaaacaacatcttaccagaaatg

SEQ ID NO: 602 - DNA, 1095 bp, Serratia marcescens
atgaataacctaactgacattgatttaagccctcaagcgttaatggctatgcatatttctatttcgtcatatgcattgcttaaccaaagctacagtaatttattactcagccagcaattactggcgtcgcaaaatatggaccctggtttgaccgttaaaattaaggcttaccaaaaccagctaaggcaacaggcgcaaatattcaagcaaagcacggtcgcggaactgatcgggttatacaccaaggcgtcagatttctccgccctggtcaacgcggttaatacgctgtactccactgaggacccgcaggtttctcaaaaaggctcagaaatggtgtctgcgctttccgagatcgcacaacgctatcaggctgcggcgcaagccgtccatatccagttgcagacaacgagtgaaatgctgactcccgtcatggccaatttccgtgaagtgattagtgccatcgagcaagggctgaatgtcgaagcgaagcaacaggcgcaaaccatcgctgaactcaatgaagcgatcgcaaaaaatatccaaagcatcgcagaggcggggttcaaagcgggtgaaggcgttgtgcagcttgggcaatccatcgtagcgacagtgccgctcggccctgcggacaaaaaaaccaaagaagccgcggccgcggcgtcgaaaccgctgggcgatcaggccagctacatgatctccggcattcaagcgatctcctcaggggcatccggcgcacagcaggccgtcaatgagttgaaggctaactacgccaaattggctgtagcatatcgagctttggcaaccgccaatgcgttgctttccgtagccaagtccgtgcacgcccaggctcaactgtttgtcgacacctatgccctcactacacagcgcatggcgttactaccggatgagtggaataaggtggctgatgcctatctgacggctgcgcccatcattaatcaggccaacagtgctttggaaattaaacaggccaaacaaattatttctcttaatgcggaaaagtggcagcttttttccaaatccattgataacgccaaagctaattatgcaggaaacaacatcctgccggaagtt

SEQ ID NO: 603 - DNA, 1077 bp, Unknown
  Spicies not identified
atgaccaacgcaacaaccattaccatggaccagggtatggccaaccaggcttcccaagccatgcagatccagacctactgcaacagcgtcaagcagcaggtgccggtggacttcagccagttcccgaacctcaaggacaaccagacccagatcaaccaggggctcgacctggcgaaggggcacgccgacctctatctcaataccatccagccgcagatcatcaccaacatcagcaacatctccaactactttgccctgcaaaacgccattccggccgtgctgccgcccggctccaccaaggcgcagtggctcagacaactgagtgtcatcaaggagcaagccaccgaatatcagcggctctccgccgatacccgcctggtgatcgtcaatctcaacaacaacctcatcaccgactccagcaacttccaggggatcgtggtgaacctcaacagcaaggtacagggggataacggggtgctcgcccagctcaacggcgacatagacaaggtgaacgcggccatcgacggcgccatcgccggcatcgtcgccggggggctgctggtgattggtggcgccttcgtcaccgccatcggtgccgtggctgacttcgtcaccgccggcacctcgaccccggtggtcatcggcggggtcgccatgatggtcgccggggccggcggcatcacggctggcgccattgtgctgcacaactcgctgggcgcccgtcaggatctgtaccagaaacgcagcagcctcaacagcgaggtgctgatcgccacccagatcggcaacggctacaaagggctgcaggtacaggcgcaaaacgccgtcaccgccgccacccagatgagcaacgcctgggactccctcacctccgatctgggcagcctgatcaccgacctggacaaggggatcaccagcggcgacgacatccgtcagctctggctgaccgccgccgacaccacggtcaagacggtgctcaccgacgtgaccaccatcaaggcccagatggccggggtgagcccgttgcaagtgccgcagaccgacaccatcgccaacttcgtggcgcgcctggccgcc

SEQ ID NO: 604 - DNA, 1074 bp, Serratia plymuthica
atgacgatcccaacaatttacatcaacgacggcatgaacacccagtcttcgcaggcgcttcatattcagacctattgcaacagcgtgcggcagcaaataccggttgatttcgaacgcttccctaaccttcgggaaatccagcgtcagatcaataccggactagcaacggctaaacaacatgccaatcactatctcaatgatattcagccgttaattattagaaacgttacaaatattcaggactatttcgaaacgcaaaacctgatctccaccgttatgccgtctggcgcaactaaagagcaatggctgagcgctttgagcatggtcagcgataaagctagagaatatcaggaagtctcggcgaacactcgccgtacgatcggatcgttgaatgataagttgattatcgattcaaacaattatcagctgattgtggtcaacctgaataacgtggtcaatggcaataatggcgttctggaacagcttaatcgggatatcgacggcattaacgccgccattgacggcgccattgccggcatcgtcgtcggcgggctgttaattattgggggggcaatcgtaaccgccatcggcgccgtagctgggctggtgactgcaggcacctcaacgccggtcgtcatggggggcatcgccatgatgaccgctggcgcgggcggggtgatcggcggcgcgatcgtgctggataaatcattgagcgcacgtgaaaaactctaccgtgaccgcagccaactcaacagtgaagtcttggtcgccagccagatcggatccggctaccaggggttgcagactcaggcgcaaagcgcagtgactgcggcaacgcaaatgagcaatgcctgggactctctcacctctgagctggatatcctcaacgcgaacttgcgcaaagggatcattgatgacagcttcctgcgccaactgttcctgaccgcttcgcaaacgtcagtaaccaaagtgttggatggaacgaaaatcatcaaacagcagatggccggcgtggtggtgcgagaagtgccagcaaaccaaactattgccgatttcgttaagcgcctggcggct

SEQ ID NO: 605 - DNA, 798 bp, Aeromonas salmonicida
atgagcaacggtattctttctcaatccattgccaacatgcagcaggccgaagccgtcattcagtccttcaccggtctgccgcaaaacgccgtcaacatccagcagaacgtcgaggaggtggtcgcggcgctgctgccccaggtgcaaaccatgcagcagcaggtcctggcgtttggtgcgcgcctggaggtgcaactgacgcagcagctggccaataccggccccttcaaccccgaggcgctcaaggcattcgtcgatctggtccagcaggagatcgcccccatccagacgctgaccgcccagaccctgaccgccagccagacggccaacgatcgcatcacgcaagacaacatagcgttgcaacggatcggcgtggagctgcaagccaccatagccgggctgcaatccaacctggccggggcccgtcaggagctggactccctcaacaagaaaaagctctacctgctggggctgggattgctggggctgccgggcctcatcgccctggccgtcaccctgacgcaaacccagaacaaggtgaacagtctggagggacaggtgaaccagattgaggggcagatccagcgtcagcaaggctttctcggccagacgacggccttctcccagcaattcggttccctcatcgatcgggtgagcaaggtcggcaacaccatcaccctgctcggcggcgatattgccaacgtcgcccgcgatgccgggcaaggggatcctgagctggcgcggctcttcttcaccgccgccctcaccgaagttcgcaccctgcaggtggacgcctcc

SEQ ID NO: 606 - DNA, 798 bp, Aeromonas species
atgagcaacggtattctttctcaatccattgccaacatgcagcaggccgaagccgtcattcagtccttcaccggtctgccgcaaaacgccgtcaacatccagcagaacgtcgaggaggtcgtcgcggcactgctgccccaggtgcaaaccatgcaacagcaggtcctggcgtttggtgcgcgcctggaggtgcaactgacgcaacagctggccaataccggccccttcaacccagaggcgctcaaggcattcgtcgatctggtccagcaggagatcgcccccatccagacgctgaccgcccagaccctgaccgccagccagacggccaacgatcgcatcacgcaagacaacatagcgttgcaacggatcggcgtggagctgcaagccaccatagccgggctgcaatccaacctggccggggcccgtcaggagctggactccctcaacaagaaaaagctctacctgctggggctgggattgctggggttgccgggcctcatcgccctggccgtcaccctgacgcaaacccagaacaaggtgaacagtctggagggacaggtgaaccagattgaggggcagatccagcgtcagcaaggctttctcggccagacggcggcattctcccagcaattcggttccctcatcgatcgggtgagcaaggtcggcaacaccatcaccctgctcggcggcgatattgccaacgtcgcccgcgatgccgggcaaggggatccggagctggcgcggctcttcttcaccgccgccctcaccgaggttcgcaccctgcaggtggacgcctcc

SEQ ID NO: 607 - DNA, 798 bp, Aeromonas species
atgagcaacggcattctttcccaatccattgccaacatgcagcaggccgaagcgaccattcagtccttcagcggtctgccgcaaaacgccgtcaacatccagcagaacgtcggtgaggtggtcgcagccctgctgccccaggtgcaaaccatgcagcagcaggtcctggcatttgctgcccgcctggagctgcaactgacgcagcagctggccaataccggccccttcaaccccgatgcgctcaaggcgttcgtcgatctggtccagcaggagatcgcccccatccagactctgaccgcccagaccctgaccgccagccagaccgccaacgatcgcatcacgcaagacaacatagcgttgcaacggatcggcgtggagctgcaagccaccatcgccgggctgcaatccaacctggacggcgcccggcaggagctcgactccctcaacaagaaaaaactctacttgctgggactgggattgctggggctgccgggtctcatcgccctggccgtcaccctgacgcagacccagaacaaggtgagcagcctggagggacaggtgaaccagattgaggggcagatccagcgtcagcaaggcttcctcggccagacgacggccttctcccagcagttcggctccctcatcgatcgggtcagcaaggtcggcaacaccatcaccctgctcggcggcgacattgccaacgtcgcccgcgatgccgggcaaggagacccggaactggcgcggctgttcttcaccgccgccctcaccgaggtgcgcaccctgcaggtggacgcctcc

SEQ ID NO: 608 - DNA, 798 bp, Aeromonas species
atgagcaacggcattctttcccaatccattgccaacatgcagcaggccgaagcgaccattcagtccttcagcggtctgccgcaaaacgccgtcaacatccagcagaacgtcggtgaggtggtcgcagccctgctgccccaggtgcaaaccatgcagcagcaggtcctggcatttgctgcccgcctggagctgcaactgactcagcagctggccaataccggccccttcaaccccgatgcgctcaaggcgttcgtcgatctggtcgagcaggagatcgcccccatccagaccctgactgcccagaccctgaccgccagccagaccgccaacgatcgcatcacgcaagacaacatagcgttgcaacggatcggcgtggagctgcaagccaccatcgccgggctgcaatccaacctggacggcgcccggcaggagctggactccctcaacaagaaaaaactctacctgctggggctgggattgttggggctgccgggccttatcgccctggccgtcaccctgacgcagacccagaacaaggtgagcagcctggagggacaggtgaaccagattgaggggcagatccagcgtcagcaaggcttcctcggccagacgacggccttctcccagcaattcggttccctcatcgatcgggtcagcaaggtcggcaacaccatcaccctgctcggcggcgacattgccaacgtcgcccgcgatgccgggcaaggagacccggaactggcgcggctgttcttcaccgccgccctcaccgaggtgcgcaccctgcaggtggacgcctcc

SEQ ID NO: 609 - DNA, 798 bp, Aeromonas species
atgagcaacggcattctttcccaatccattgccaacatgcagcaggccgaagcgaccattcaatccttcagcggtctgccgcaaaacgccgtcaacatccagcagaacgtcggtgaggtggttgcggccctgctgccccaggtgcaaaccatgcagcagcaagtcctggcatttgctgcccgcctggagctgcaactgacccagcagctggccaataccggccccttcaaccccgatgcgctcaaggcgttcgtcgatctggtcgagcaggagatcgcccccatccagaccctgaccgcccagaccctgaccgccagccagaccgtcaacgatcgcatcacgcaagacaacatcgcgttgcaacggatcggcgtggagctgcaagccaccatcgccgggctgcaatccaacctagacggcgcccggcaggaactggactccctcaacaagagaaaactctacctgctggggctgggattgctggggctgccgggcctcatcgccctggccgtcaccctgacgcagacccagaacaaggtgagcagcctggagggacaggtgaaccagattgaggggcagatccagcgtcagcaaggcttcctcggccagacgacggccttctcccagcagttcggctccctcatcgatcgggtcagcaaggtgggcaacaccatcaccctgctcggcggagacattgccaacgtcgcccgcgatgccgggcaaggggatccggagctggcgcggctgtttttcaccgccgccctcaccgaggtgcgcaccctgcaagtggacgcctcc

SEQ ID NO: 610 - DNA, 801 bp, Serratia plymuthica
atgagtggtggaatgctaacgcaagtcatcaataatttatcgcgcaccggtgaggctattcaaaaattcgatggtctgccggccaatgcgatcccaatccaacggaatatccagagcgctattaacacgctgttgccggacattaaacaaatgcagcgtgatgtgacgacctggggtctgaaactcgaggctcagcttgatgaaaaactggcggttttggagagcttatcccccagcgaactgaccatgttcattcgccaaagcaaggaggaaattaccaaggtaatgagtcaggtcgataaagttaaagatcgtacgaaaaataccgataataccgttgttgataataatataaccctgcaacgcattatcatcgacctgcaggcgacgattgccgggctgaaatcgaatttgcaaggtagccagcagaagctcgatgagttgaacaagaaaaagtactactttattgcgctcggtattttgggtatcccggggctgattgccatggcagtactgctcagtgaagcacaaagtaacgtgaatagcattgagcgtcagatttcagcacaacaatcggatattcgacaacaacaaagctttgcgacacaaactgttgcattctcacaggatctgcttgagctgagtaaccatatgctgaagatcggcaatgctatcgagtttgtcagcaatgatattcagaaagcggagaaaaacatctctggtggcgaagcagcacaattgacgaaattgttctttactgcagcaaaaatgagtgtgaaaacgttgctggtagacgcgtct

SEQ ID NO: 611 - DNA, 456 bp, Pseudomonas gessardii
atggaacaagaccagatcaatgtgctttggagtttgttcggttttatcggccagaagtggggcaccgccgccgattgccaaatgccgcagcagcagtttcagcaagcgctgcaatggcaaatgcaacgcgaccccgcttacctgggttattaccggcaaaccattgccgaataccaagcgcttctccagcaataccacacacctacctttgccctggcggcgctgatcaatcaaaacccttattcatccagcaatccttcgccggtggccaactacgtgctgcttgaattcatgcgctggaatatcgcatttggaggcttcaagacgttcggctacatgaactacaacggctggatgggcggcgggtcgtttctgaataaaccaccaccttatcgcgcgcttaacattcaggcgcagacccaaccagtgggaggcgatcatggccaaggtgcgtaa

SEQ ID NO: 612 - DNA, 1599 bp, Pseudomonas gessardii
atggccaaggtgcgtaatgaatcagccaatatcgtgatcgtcggctccggcgtggctggcagcctgatggcaagccggtttgcaaaccacccgggcgtggtcattttagaaaccgggccaagcattcccatgggcgatcccggttggtggtttcatcatgttgcacgaggtggcggtaccggcaatacaccctatgccgccttttacgaccaggcggcagacttcgatgccaccggagccaacccctggaatatccagggtgggcgaatattcggcgccggcggcaccatgctgcattgggggggctgggtaccgcgcttcaaacctgaagattttgcgctttacagcaataccgggcagggcatcgattggccatttggctacgatcagttggaaccgttctacaaccaggccgagcggtacttgggcgccagtggtgactccagcgacaataatccgccccgcagccaaccctatccctatggcgcagcgccttatccgatttcggctgggccattcattcaggcgtttgctcgcgttcgcccagccataggatttgggcatttaccggtggcgcgctatgggcaggccaatggaatgggtggcccatgccgcaccacaggtacctgcgactactgcccggtagcgggccgtttcacaggtgaccagccgctggccctgctggccgacaaccccaacgtgagcctgcgcctcggagcggctgttacggcgatccgcatggtcaaccggcaacaggtggcgggtgttacctacacagatatgaacacgggtgacaccgtgctgttggacgcccagaacgtaatcctgtgcaacggcgcgtttgagattcccaagttgctccaggcgtccacatcgagttactggcccaaggggatcggtaacgaccgcgatctggttggccgttttgtcagtgcgactcaatttttttatgcctcaggtactgcgcccaacccccagaagtttgaggaagagttggggttccccagcctgtgttcacggaccttcgacgcacctcagtatcagaaggacggcaagtttttcatatcgatgaactatgaaacgcccaatatcgatgtgggcctgatgatggctcagggctatagcgccagccagattcgcgacgcttgtaccgcgcccgccaagtatcaactgtatggcaacctgtcggcgatcccgcagttcaacaaccgggtctcctgtgcagtgggtactacccgtttcgggttgccgcgcacctcaatctacacgcctgacccgttgtttgatcccctgaaagcacagatctacgtggataaactcaagaccgtcctggcgcaaatgggttgcaccgatgtggggtggggcacttacccccaacggggcgatcatgtggcctgcaccacgcggatggccaacgaccccaacctgggggtggttaaccctcagttgcaagtgtttggcgtggataacctttacgttgtcagcaacagtgtcatgcccacgctgcctgcggccaatccaacgctgaccctggtggctttggcgatgaaggcaatgggcggcgacactgcgctggcacgcttggcaaaatcggcttga

SEQ ID NO: 613 - DNA, 1596 bp, Pseudomonas gessardii
atggccaaggtgcgtaatgaatcagccaatatcgtgatcgtcggctccggcgtggctggcagcctgatggcaagccggtttgcaaaccacccgggcgtggtcattttagaaaccgggccaagcattcccatgggcgatcccggttggtggtttcatcatgttgcacgaggtggcggtactggcaataccccctatgccgccttttacgaccaggcggcagacttcgatgccaccggagccaacccctggaatatccagggtgggcgaatattcggcgccggcggcaccatgctgcattgggggggctgggtaccgcgcttcaaacctgaagattttgcgctttacagcaataccgggcagggcatcgattggccatttggctacgatcagttggaaccgttctacaaccaggccgagcggtacttgggcgccagtggtgactccagcgacaataatccgccccgcagccaaccctatccctatggcgcagcgccttatccgatttcggctgggccattcattcaggcgtttgctcgcgttcgcccagccataggatttgggcatttaccggtggcgcgctatgggcaggccaatggaatgggtggcccatgccgcaccacaggtacctgcgactactgcccggtagcgggccgtttcacaggtgaccagccgctggccctgctggccgacaaccccaacgtgagcctgcgcctcggagcggctgttacggcgatccgcatggtcaaccggcaacaggtggcgggtgttacctacacagatatgaacacgggtgacaccgtgctgttggacgcccagaacgtaatcctgtgcaacggcgcgtttgagattcccaagttgctccaggcgtccacatcgagttactggcccaaggggatcggtaacgaccgcgatctggttggccgttttgtcagtgcgactcaatttttttatgcctcaggtactgcgcccaacccccagaagtttgaggaagagttggggttccccagcctgtgttcacggaccttcgacgcacctcagtatcagaaggacggcaagtttttcatatcgatgaactatgaaacgcccaatatcgatgtgggcctgatgatggctcagggctatagcgccagccagattcgcgacgcttgtaccgcgcccgccaagtatcaactgtatggcaacctgtcggcgatcccgcagttcaacaaccgggtctcctgtgcagtgggtactacccgtttcgggttgccgcgcacctcaatctacacgcctgacccgttgtttgatcccctgaaagcacagatctacgtggataaactcaagaccgtcctggcgcaaatgggttgcaccgatgtggggtggggcacttacccccaacggggcgatcatgtggcctgcaccacgcggatggccaacgaccccaacctgggggtggttaaccctcagttgcaagtgtttggcgtggataacctttacgtcgtcagcaacagtgtcatgcccacgctgcctgcggccaatccaacgctgaccctggtggctttggcgatgaaggcaatgggcagcgacactgcgctggcacgcttggcaaaatcggct

SEQ ID NO: 614 - DNA, 492 bp, Chromobacterium aquaticum
atgttattgatctcaaggagtccacacatgactatcgatcgcgatcaaaaatccggcctgttcatcgtcagctacaacgtcaacaaacccggccaggcgggcggcctgaacctgcggctggacctgaccgtatacaccccgtcgcgccacatcaccggccgcgccaccatcacccacgccacgctgcagccgctggtgttcgagcatccgattcaaggccgctacgaagagcaaggccgcgacatcgaactgcatctggtaggcgcgccgcgcctgcacgatcagcacgcgcaaaaccaggcccacgcggccggccacgcgctgctggaacagttcttcttcgacggtcaactgaaagacggctggcaagccggcaacaactccaaggcgcgctacgccttcttccagaaccagcaatggcacgagcagctgggtcaggaagtgcgcctggcggatgaaatcaacaacgcgatcaaagcgctaaacctgcgc

SEQ ID NO: 615 - DNA, 468 bp, Chromobacterium species
atgactatcgatcgcgatcaaaaatccggcctgttcatcgtcagctacaacgtcaacaaacccggccaggcgggcggcctgaacctgcggctggacctgaccgtatacaccccgtcgcgccacatcaccggccgcgccaccatcacccacgccacgctgcagccgctggtgttcgagcatccgattcaaggccgctacgaagagcaaggccgcgacatcgaactgcatctggtaggcgcgccgcgcctgcacgatcagcacgcgcaaaaccaggcccacgcggccggccacgcgctgctggaacagttcttcttcgacggtcaactgaaagacggctggcaagccggcaacaactccaaggcgcgctacgccttcttccagaaccagcaatggcacgagcagctgggtcaggaagtgcgcctggcggatgaaatcaacaacgcgatcaaagcgctaaacctgcgctaa

SEQ ID NO: 616 - DNA, 441 bp, Chromobacterium species
atggctagccaagatcgcgatcagaagtccggactgttcatcgtcagctacaacatcttcaagccgggcatcaccggcggatacaacctgcacctgctgctgtcagtctatccgccggctcgccaggtcagcggccgcgccgtcatcacccaggcgctgcaacatccgctggttttcgaaaatccggtgcaaggccgctacgaggaaaagggcggcgacatcgagctgttcctccacggcttccgcctgcctatcgactcgggctccccgcgcgctggcgatttccacttcgacggccacctgaaaggcggctggcacgctgaaaacggctcccgcgcccgctacgccttcctgcaggccggccactgggtagaggaagtcggccaggacatccagttgtccgatgaagtgcggcataccgtcaaagcgctgaacctgcgc

SEQ ID NO: 617 - DNA, 2067 bp, Chitinophaga pinensis
atgtctattttcgatttcccccggatcaatttcaagggcctggtatccatcaatgtaggcaccgccaacaacgacgactattccggcgagcagttcgtgggcggcccctataacgggatgcccgtcaggcttgcggattccgccaacgtacagcccatgctgtatggaatggatgatgatacctgggtcaaatgggccgtaacgcccctatccgtgtacaacccgcccccgccctcggccgctaaagccgcgccacggcgcttcgaaggtaaacccgccatccaggaaaataccgccaattccaccatcatccctggcgaatggaactattatggcgatatgggcctggatatgatcaacgtgaacgtcaccggtgtgaatgacccgggcaacgtgatcccgtcctcgctcatgagcaccatcaggtcgagccagttatcttacctcaaccggcccgggcccaacggccgcagcaccggcatggtgatcgacatcaacccggaagaccccaccaacacgcaggtcttcacggacgcgctcagccttatggccggcgactccgtggtcttctccgccaagccctccaaagccatgacccgctggatcaacttcacgcgcaacggcgcattgacaggccccaacggcgcggcggccatgttccagtgcgttttgccgctcagcgtattgcaaggccaaagcatcctgcagggcatgccagctacctctcccaccggccagcccctcgcaggtatcgtatgccgttacacgatttaccggccgctgcaaaagatcaacgtctttaaatacaacccgcaacagtggatcgaccagatgttgcagctctatgccacgcagggcgtcaaccccgacttcctggagctgcagggcaccatcgccccctggttccagggcgacgccatctcccaaacgaccggccgctacctggagcccgtccccttccctttccccaacggctggaaaggcaataccatgggcagctccaccatgagcctgccgcctgtcatcctgcaatacagcaagcaaaaccggcaaatatcgatcgacctgtcccctgtgctgcccgacctctaccagggcgcgccggactacgacccgatggttaccggcaacgatcccaaatacaacctcggcaccatcaccctcgcggtggcgttcgatcccacgcagggcctcgatgcggcgttgcccatcggccagatcaattacatggatatggccaccaacgacgccaacggctggatctttgatttcacctggaatgcgtttatcgacagcgccctgaacgacgggtacaaattctatctctattgcggcggcagccagggcatcaaccaggccatccatatcgaaaaaccgctgtttctcttctccgaaacttccggcgtatatgccgagcaggatacttccagtccaaacgccagcaccaaccgcttccgcgatgatggcgcagacacggtgccgatttcttttatcggctaccagaacgggcagaagctcaccaacaacgggggcaacaccttcgatttgtggtattacgataccacgcccaaccaatcgcctggcccggctactttgctgctcagcgggtacaaccttggcgatcccatcacgctgggggtattcaaaaacgggaatgtgctgatcacctgcaccacgcgcgacaatcccccgccgatcaattacggtcagttcaatccgcttaccgggtcgatcatcaacgtgcgggtgctgccgaacgacgaggattattcgcagtattataaagatccttcctcaccgcaacccaccggtaacgaccggctcactttcgacgtgatttacaccaaggtgctccgcaactattacctgctttatcccgcgatgagcagggtgctgaagctgaacgacccttccatctggcaagaccccgtcatggcgcgcgccctgctcgatcggatcagcctgccgcaatggaatacggccatcgccatgcccagaacccgcgacctgtctgcctcccgcaggaaattactcaccgcctggtgcctcaaaatcatcaacccctaa

SEQ ID NO: 618 - DNA, 1323 bp, Chitinophaga pinensis
atgaaatacctgatcaccggcctgctgctctgcaccggcctcatggccgccgcgcaggcgccctacaccatcacgctgcaaaaagcatccgcccaacccgcgcctgccctgcaatcctacgccatcgccgtgcaaaacgggctttggctgctcgtaggcggcaggaccaacgggttccacggcacctccggccccgggtccactttccccacttcgaaatccaaccagtccatctgggtgatagaccccgtcaacaacaggtcctggaaaggcaacatccctccggcgctgcaataccagctcagttccaccaatatggcgttctaccaggacggcaacaccctttactgcatcggcggctacggcgccggttgcccgaacgacagctgctatcaaacctttccgctgataacggcgatcgacgtgcagcggaccatcgccgccgtacagaacggatacgccctcaacaattacatcaaaaccacgcaggacagccgcatggccgttaccggcggatatctcaccaagcttaacgactggttccacctcgtgatggggcaggattacaacgggaaatattccggcggggtaacggggaaatacaccgagcagatcgcgcggttcaagctgatcaccctcaatggcgcgcctgtaatcagcagttacaacgtgatcaccaccaaccagtcctacaacggcgccaaccagttccaccggcgcgattacccttccgtgaaaatggtgatgcccgccaaccgtaatgtgggcgtggcggtgttcggcggtgtgtttaacaaccagggcgggcctttcctgaaccctgtttacttcgaagacatgggcttcaataccctggcgcagatcgacacgtcgttcaagcaacggtattgcctgtacgattgcgcggccatttccgcgttcaactccgccagcaacgaagcgtatgtttctttcatcggcgggattacggactggtacatcgacgatcagggacatgaagtgcccggcaatgcgtcgaacttcatgccctggttcaaccgggtttccacgatcgtgcgcgggctgaaaggcacgcaggaatacccgcagctgaacagcaccctgcccgggtacatcggcgccaatgctgctttcctcatcaacccgcagattgccgtgatgggtaaaacggaggacgtgatcgattacgcgaaactgccttccggcaagtcgctgatcggctggatgttcggcgggatcgaagcgacggccccgcagagcaacggtttcaaccccacgagtgcgggcagtacgatttacgaagtctggttgcagaagaactga

SEQ ID NO: 619 - DNA, 2085 bp, Chitinophaga species
atgtctatctttgattatcccaggatcaattacaagggcctgatttccattaacgtaggtacggccaacaacgacgactattccggagagcagtttgttggcggtccatacaacggccagcctgtaaggctcgcggattctgccagcgtacagcccatgacctacggaatggacgatgccacgtgggtgaaatgggccgttaccccgctgggggtttataacccgcctccttccaacccctgcgccattactgccaaacgcttcgaaggtgaacggcctgccccttcggtagaagttaccaccaacgacaccattttccccggagaatggaactactatggcgatatgggactggatatgatcggtgttaaagtaaccggtatcaacgatcccaaaaacttcattccctcttccctgaaaagcaccatccaatccagccagctgtctttcctcaaccgcacaggccccaatggccgcagttcgggcatggtgatagacatcaatccggaagaccctaccaacacccagatctacaccgatttcctcagccttatctcaggtgatacggcagttttcaccggcaagccttccaaggccatgacacgttggatcaacttcttcaagaatggcaacctcaccgggcccaacggcgccgccgccatgttccagtgtgtgatcccgatgagtgaacttaccggccagcccatcctgcagggcatgcctgcaacttctcctaccggccagtcgctcaccggtatcgyatgccggtttacagtgtacaggccactacagaaaatcaatgtttttaaatacaaaggccaggcttatatagatgccatgacggccctgtacgctacacagggcactaattcagacttcctcgagatacagggtaccattgccccatggttccagggcgatgccatttcgcaaaccacaggtcgctacctcgaaccacaaaccttcccatggcccataggatggaaaggtaacaggatgggagcaccgcaaatgcagataccacccgctatattgtattaccgcaattacgaccagttcaaacaaatacccgggcagatatcgatagacctctccgccgtgctgccggatatgtatctgggtaattatgaccccatggttaccggcaacaatcccaaattcgatatgggacagctctacctcgccatcggtaatcctgctaatctcaacgatcccaacaccctcgtactggggcagatcaattatatggacctgcaggcgaacgatgcaaacggctgggtattcgacttcacctggaacgctttcatcaatgccaaagtcaacaatggcgaaccattcttcctatacgtttccggtcctatgggtatcaatcaggccatccatatcgaaaagccgttattccttttctcggaaacctccggcgtatatgcagaacagaataccgtaacacccaatgccactactacgcagttcagggattacggtccgggtactgtgcccatctcgttcatcggttacaaaaacggggtgcctttaacgaataacggcggatacgattaccagctctggtattacgataccacgcctaaccaggcaccgggcaatgccatgaaactgcaggacaattacaacctcggtgatcccatttcattgcctgtcagcaaaaaaggtaatgtactcataacctgtacaccttccgatacaccacccccttcctgctacgcccagttcaacccgctcaccggttccatcatcaacgtgcgggtgctccctaacgacgaagactattcgcagtattacaaagacccgaattcgccaaccccaaccggcaacgataagctgacgtgggatgtggtttacaacaaggtgctccgcaactattaccttctctaccctgccatgagccaggtagtgaacctgagcgaccctgccatctggaaggatcctgtgatggcccgcgcgctaatggggcgcatcagtctggacgtatggaatacagccagtgccatgccccgcacccgcgacctgtcagactcccgcaggaagctgctcaatgcctggtgcctcaaagtcattaacccttaa

SEQ ID NO: 620 - DNA, 1323 bp, Unknown
  Spicies not identified
atgaaacaccttatacttggcctcttccttttcgccaccataacagctgccgcacaggcgccctacaccatcagcctgaaaaaagctgccagtcaacccgcccctgccctgcaatctttctgcatcgccgttcagaacggcctgtggctggtagtaggcgggcgcaccaacggcttccatggaaccgccggctccggctccacctttccgtcctcggaatccaacaaattcatctgggtgatagaccctgtcaataacaaatcctggaaagggaatatccccacggcattgcaataccagctcagttccaccaacatcgcattttaccaggacggcaatacgttgtactgcataggcggatatggtgcgggatgcgcaaacgacggctgttaccagaccttcggacaaatcacggctattgatgtacaacgtaccattgccggtgtgcagaacgggtttgcactcaacaattacattaccaccacgcaggatagtcgcatggccgtaaccggtggctatcttgtaaaactgaacggctggttccaccttgtgatggggcagaattacacaggcaaatattccggagcggttaccggtaaatacacggaacagattgcccgtttcaagatcagcaccagcggcggcaacccggttgtctctaattacacaaccattaccaccggcgagcagtacaacggcgccaatcagtttcaccggcgcgattacccttctgtaacaatggtgatgcctgccaaccggaacgtgggtgtaggcgtatttgccggtgtgtttaataaccagggcggccccttcgtgaaccccgtgtattttgaggatatgggctttaatacccttgcacgggtagacacctcttttaagcaacggttctgcatgtacgactgcgcagccatatcatgctacaactccgccaccacggaagcatatatctccttcatcggcggcattaccgactggtatatcgacgatagcggaaacgaagttcccggcaatgcgtccaacttcatgccctggttcaaccgggtatctaccattgtgcgtaccgccaacaccacgaaagaatatccgcagaaaaataccacactgcctggttatatcggcgccaacgcagcatttatcatcgcacctaacaccccggtgatgagcaaaactactgatgtgattgattacgccagattaggttcgggcaatacattaataggatggatgtatggcgggatagaagccaccgcgccgcaaagcagcggcctgaatcccactaattcatcaggcaccatttatgaggtatggttacagaagaactga

SEQ ID NO: 621 - DNA, 321 bp, Pseudomonas brassicacearum
atgtcgagcattaatggaacttatgtaagctataattcggacgccaaactggtggtcaccgatggcaacgactcgaacggctcgttcagcgggcagatcacccaggccggcgtgaactacaacgtgaccggccactaccacttccagaacagcaccggccagcctacgatcatcgccttcaccggctacaacgatggtcacggctatgtcaccttcgccgccttctcccctgaccacaactacgggaagctgagagccagcggttcacgcaccacctttgacggccaagtggtcggtctgggtggcgagttcgtcaaacag

SEQ ID NO: 622 - DNA, 321 bp, Pseudomonas brassicacearum
atgtcgagcatcaatggaacttatgtaaacgccaactctgacgccaaactggtcgtgaccgacggtaacgactcgaacggttccttcagcgggcagatcacccaggccggtgtgaactacaacgtgaccggccactaccacttccagaacagcaccggccagcccacgatcattgccttcactggctacaatgatggtcacggctatgtcaccttcgccgccttctcgcccgaccacaattacgggcgactgagagcgagcggctcacgcagcacctttgacggccaagtggtcggtctgggtggcgagttcgtcaaacag

SEQ ID NO: 623 - DNA, 321 bp, Pseudomonas parafulva
atgtcgagcatcaatggaacttacgtaaacgccaactcgaatgccaagctggtcgtgaccgacggcaacgacgccaacggtaccttcagcgggcagatcagccaggccggggtgaactacgatgtcaccggccactaccacttccagaacaacaccggccagccgacgaccatcgccttcatcggcaccaacgccggtcatggctacgtggccttcgcggcgttctcggcggaccataactacgcgaaactgagagccaacggatcgcgtaccaactttgacggcgaagttgtcggcctgggtggcgagttcgtcaagcag

SEQ ID NO: 624 - DNA, 321 bp, Pseudomonas chlororaphis
atgtcgagcattaatggaacttacgtaaactccaacgctgacgccaggctggtcgtgaccgacggtaacgattccaatggttccttcagcggcgagctcacccaggcaggtgtgaagtacagcgttaccggccactatcacttccagaacagcaccggccagcccaccatcatcagcatttccgcctacaacgatggctatggctaccaggcctgggcactgttttcgccggatcacaactacgggcgtctgcgggcgtcgggcgcgcggaccaactttagcggtgacgtggtcggcctgagcggcgaattcctcaaacag

SEQ ID NO: 625 - DNA, 324 bp, Unknown
  Spicies not identified
atgtcgagcattaatggcaactatgtaaacgctaacgctggcgccaaactgacgattaccgatggcaacgactccaacggcaccttcagcggcaaattcagccagaacggcgtgaactacgacatcgcgtacggtcactaccacttccagaacagcaccgggcagcctacgatcattactttcgcggctctgaatgacggcactggctatcagtcctggaccctgttctcgccggatcacaactactcgaaagttcgtgcggtgggttcgcgcaccaactttgacggtgatgtagtcggtctggccggggagtttgtgaagcaa

SEQ ID NO: 626 - DNA, 324 bp, Pseudomonas brassicacearum
atgtcgagtattaacgggacttatgtaaacgctaacgccggcgccagactggtcattaccgacggtaatgattcgaacgggactttcagtggcaagctgagtcagaacggtgtgaattacgatgtcagttatgggcactaccacttccagaacagctctggcaacccaaccatcatcacggttgcagcgcttaacgatggcgtgggctatcaggcgtggacactgttttcgccagatcacaactactcgaaactcaaggcattcggttctcgcaataacttcgatggcgatgtagttggcttggctggcgagttcgtcaaacaa

SEQ ID NO: 627 - DNA, 330 bp, Chromobacterium haemolyticum
atgtctaaaattaatggcacatataagaacaataacatcaatgcccaattagtgattgcaggtgcgaatgatagcaatggcacttttagtggccgttatacgcaagacggtcaggagtatgagattatgagtggcgcagggcactatcactttactgctggaggtaaaacaggaactgcaatctcgtttgttgttaataataataccctgggcttccagtcatggtccttgtattctcctgatatgtcattttcctcacttcgtgggaatggggcaaaggcatttcgtgatggaacgtattacggttttggtggtgagtttgtgagggtg

SEQ ID NO: 628 - DNA, 327 bp, Bradyrhizobium species
atgagccgtctgcagggcacctatgtgaacgataacattggcgcgaaactggtgattagccaggcgaacgatagcaacggccagattgcggcggcgagcattagctataacggccataactatccggcgaccggccattatcatttcaagaacagcaccggcccgaccaccgtggcggtgctgaccggcctggatgatgataccggctatgtggcgctgagcctgaccgcggaaaaccaggaattcaaacgtctggaaagctttggcggcctggtgaactttaacgcggaaaccattggcctgggcggcgcgtttattcgtcagtaa

SEQ ID NO: 629 - DNA, 1008 bp, Burkholderia ambifaria
atgtcgaatgccagtctcgagcaagcgcagatcaatctcacgttagcctacattgtcaactattcggccaccgactatacgtcgggaaagcaaatcccgaatccaactgcagcacaggtcagtcagaacatcaggaatggcctgagcaattccaagatgactcaggacaaacagttcagtatcgtctgggggcccgccgtgcttcgggacgccgattcggatggctatgcggccaacatcactgtcgtactgaaatcgaacgtcactgatcaatattcagtggtgaccagtggcactgatttccagtctccccaggacattctggaggacaacctgtacgaaaccctcgtgtcattccagaagtacgtgccctcgtgtcacagcacggcgggcatatcggtcggaacggatatcggattgtcgtcagttatcctgactacagacgcaaacggcgtgatgctcgtcgactttctcaagacggtgcgagcctcgagcacgatcaatgttatcgggcacagcctgggcggggccttggcatccggactggtcttgtatctgaagaacgcacgttacttacaggcgcagacgtttaaatacacttgccagacatttgccgccccgacggcgggtaacgatatctttgccggttacttcgacgagcaaatgaaagccaacgcgatacgcgtgtggaatacgtgcgacatcgtgccgatggcatggaacgcagacaccatcggtgccgtgaaaacgatatatggttcggtagccccgccctcggacgtcatcaaggtacttatcgacgcgataattgttacggcagcccccctgaactacagacaatgggggaacaacggctcccagcaaatgaagcttgacgggaatgttgtaggcaatattacggatttctttatgcaggccggatttcagcacatcctcggatacatcttccttctggggctgggtttgggcgacatccatatgcccccgccccccaacacccaggagaag

SEQ ID NO: 630 - DNA, 1008 bp, Burkholderia diffusa
atgtcgaatgccagtctcgagcaagcgcagatcaatctcacgttagcctacattgtcaactattcggccaccgactatacgtcgggaaagcaaatcccgaatccaactgcagcacaggtcagtcagaacatcaggaatggcctgagcaattccaagatgactcaggacaaacagttcagtatcgtctgggggcccgccgtgcttcgggacgccgattcggatggctatgcggccaacatcactgtcgtactgaaatcgaacgtcactgatcaatattcagtggtgaccagtggcactgatttccagtctccccaggacattctggaggacaacctgtacgaaacccttgtgtcattccagaagtacgtgccctcgtgtcacagcacggcgggcatatcggtcggaacggatatcggattgtcgtcagttatcctgactacagacgcaaacggctttatgctcgtcgactttctcaagacggtgcgaccctcgagcacgatcaatgttatcgggcacagcctgggcggggccctggcatccggactggtcttgtatctgaagaacgcacgttacttacaggcgcagacgtttaaatacacttgccagacatttgccgccccgacggcgggtaacgatatctttgccggttacttcgacgagcaaatgaaagccaacgcgatacgcgtgtggaatacgtgcgacatcgtgccgatggcatggaacgcagacaccatcggtgccgtgaaaacggtatacaagtcagttgccccgcccagcgacgccatcaaggtgctgatcgacgcgataattgttacggcagcccccctgaactacagacaatgggggaacaacggctcccagcaaatgaagcttgtcgggaatgttgtaggcaatattacggatttctttatgcaggccggatttcagcacatcctcggatacatcttccttctggggctgggtttgggcgacatccatatgcccccgccccccaacacccaggagaag

SEQ ID NO: 631 - DNA, 1008 bp, Burkholderia ambifaria
atgtcgaatgccagtctcgagcaagcgcagatcaatctcacgttagcctacattgtcaactattcggccaccgactatacgtcgggaaagcaaatcccgaatccaactgcagcacaggtcagtcagaacatcaggaatggcctgagctattccaagatgactcaggacaaacagttcagtatcgtctgggggcccgccgtgcttcgggacgccgattcggatggctatgcggccaacatcactgtcgtactgaaatcgaacgtcactgatcaatattcagtggtgaccagtggcactgatttccagtctccccaggacattctggaggacaacctgtacgaaaccctcgtgtcattccagaagtacgtgccctcgtgtcacagcacggcgggcatatcggtcggaacggatatcggattgtcgtcagttatcctgactacagacgcaaacggcgtgatgctcgtcgactttctcaagacggtgcgagcctcgagcacgatcaatgttatcgggcacagcctgggcggggccctggcatccggactggtcttgtatctgaagaacgcacgttacttacaggcgcagacgtttaaatacacttgccagacatttgccgccccgacggcgggtaacgatatctttgccggttacttcgacgagcaaatgaaagccaacgcgatacgcgtgtggaatacgtgcgacatcgtgccgatggcatggaacgcagacaccatcggtgccgtgaaaacggtatacaagtcagttgccccgcccagcgacgtcatcaaggtgctgatcgacgcgataattgttacggcaacccccctgaattaccgacagtgggggagctacggctcccagcaaatgaagcttgacgggacggttgtaggcaacattacggacttctttatgcaggccggatttcagcacatcctcggatacatcttccttctggggctgggtttgggcgacatctatatgcccccgccccccaacacccaggaacag

SEQ ID NO: 632 - DNA, 1038 bp, Burkholderia ambifaria
atgacatccagcagactcgagcaaatgcaggccaatctcacgttggcctatgttcttaacaacgcagcagtcgacggagtcgggagggaactcaagcatccgactgcgtcgcaggtcaaaaagatcatcgtggatcgcctgaaccgatcgaagatgacgcggaacgatcggttcgaaattgcgtgggggccggcgatcgtattggatccgaatggcgaagctgccaatgtcaccgtcgtcttgcaattggccggttccggcgaatatacagtggtgacgagcggcaccaatttcacgtccccgcttgatgttctgagcgatttttcctatgacaccctcgagccattcagcgcgtatgtgccgaactgtccgtcggacgcacgcatatcggcgggtacgaacggagcgctgtaccacgtactgaagacgcccgatgaaagtcatcagacgctcgtccaattcctgagcaccgtgccaccgtcatcgatagtcaacgttgtcgggcacagcctcggaggcgcgttggcgtccgcgatcgtgttgtacctgaagaatcagagcggcttgcagtctctgacgtaccactgccagacgtttgcggcgccgacggcaggcaacgatgtgttcgccggctatttcgacgagcagatgcgaggcaatgcggtacgcatattcacgacgcgggatatcgtgccgatggcatggaatgcggacagcctccagaaggtgaaacacgtctacagcgacgttccttaccatgacacccctgataacgtgaaggtggctgtcgatatggtcagcattgcgacaaattcgctgaagtacacccaatggggaacgtctgaaccatcagggcccgtggcgacggcgatggagtatcagctgaaggcggacgtcaatgtagccattctggatttccaggcgcaggttggctttcagcatatcgacggatacattgcctgcctgggtatggcccgcagcgacattgatctccccccgctgccacaggtcaaccccaaggtcggtaaaacgcccgtg

SEQ ID NO: 633 - DNA, 990 bp, Pseudomonas chlororaphis
atgacttcgctagactcacttcagcaaaggcaaatcagtcttacacacgctttcgtggtcaataatgcggcgaggtattcgccgacctgggaaaacatcaagaacccttcaccaagccaggttaaagacaacattctttcgcgtcttaatggctccaaggtaggcggcggctatggcgtagcctggggccccgcactggtgatggatggcgattacacggctcacatcacagtggtgctgatcggtgggaaaaatgagaacgacatcgtagtagtgacaagcgggacccttctcaattctcccctggatcagctggacgatcttgatatttttccaatggtgccgttgcagaaacttatcaagagctgcccggtgccggcgaacatatctcagggaactgaggggggggtacacgcgatattgcatacggcatccaagatcggttctcagggcacgctgtgtgattttctagggaagcagcgaagcggggcgacgatccggttggtcggtcatagccttggcggggcgctcatgtcagtggtcgcgctttatctgaaagacaaattctcgggctttaacttttattgcgaaacgattgctgcaccaacggctggcgatggtttttttgcgagctatttcaataagcaaatggccggtaatgcgctacggatatacaacactctggatgctataccgatggcgtggtgcgccacttctctcgacttctccttgacgctctatgaaccaaccaatgtcattgatgaagacacgaagaaagcggtttgccgtggaatagataccgttacaaacaataatttgaactatacgcaatggggcatgggcagcgcacaaatggagctgcggctctgtgggaaactgcaatccagttgcacaagctataaagcccaatccggctatcagcacatctacgagtacatatcgctgctggggttgcagcctggcgatataccgatgccaccgtttggcagc

SEQ ID NO: 634 - DNA, 993 bp, Pseudomonas chlororaphis
atgacttcgctagactcacttcagcaaagacaaatcagtcttacacacgctttcgtggtcaataatgcggcgaggtattcgccgacctgggaaaacatcaagaacccttcaccaagccaggttaaagacaacattctttcgcgtcttaatggctccaaggtaggcggcggctatggcgtagcctggggccccgcactggtgatggatggcgattacacggctcacatcacagtggtgctgatcggcgggaaaaatgagaacgacatcgtagtagtgacgagcgggacccttctcaattctcccctggatcagctggacgatcttgatatttttccaatggtgccgttgcagaaacttatcaagagctgcccggtgccggcgaacatatctcagggaactgaggggggtgtacacgcgatattgaatacggcatccaagatcggttctcagggcacgctgtgcgattttctagggaagcagcgaagcggggcgacgatccggttggtcggtcatagccttggcggtgcgctcatgtcggtgatcgcgctttatctgaaagacaaattctcgggctttaacttttattgcgaaacgattgctgcgccaacggctggtgatggtttttttgcgagctatttcaataagcaaatggccggtaatgcgctacggatatacaacactctggatgttataccgatggcgtggtgcgccacttctctcgacttctccttgacgctctatgagccaaccaatgtcattgatgacgacacgaagaaagcggtttgccttggaatagatatcgttacaaacaataatttgaactatacgcaatggggcatgggcagcgcacaaatggagctgcggctctgtgggaaacttcaatccagttgcacaagctataaggcccaatccggctatcagcacatctacgagtacatatcgctgctggggttgcagcctggcgatataccgatgccaccgtttggcagctag

SEQ ID NO: 635 - DNA, 933 bp, Pseudomonas vranovensis
atgggacgaagcagaagcctggaaaaaatgctggccgaagagaaacgcaacaaagagcgtcttgacgaaatatccagagagctggacagccaactgaaagacgctgaccaggccttgcgccagcaagcaaaaagcttttatcagaacgatggtagaaactggaagtacaacgaatatctctccggccaacaatctgacttccagctggaggacagctggtcgctggacaacctctcctcgatcatcgacaagatttcctccgcggtcgtcggcaccgtcaccggcaatattaccaacgtgccagaggggacgagcgttgctgctgacgccgagaagatcaacaagaccggcgacctgacaaccgacactcgcctgctggtagccaccaactgcttcaacctgctctcgggcatcgtcaactcgttcggcagcattagcaaggttcaggtgcatacaggctccagcaccattccgattggccaggggctgcgtattttcgccaccgtcgccacaaacgtgagccagcagcgttcgttcttcaacaacaagatcctctgcacttaccgatatgcctatttcgtcccctattcgctcgacgagttccaccagcaggctgaacgcacactcgtcgctcagtacgaacgaacactcaatacactgaacaaggcgtcacaacagaatgacgacaagtttgccaatggcaccatcgaccttgaccaatatctggagacggcagacaaactggaagcccggaccctggaagtcattcgaaaaattgaacaattgaaaaagcaggatggggatctcaaggggatcgcagagctgcacatgcggcaaaccgccttcctcgtcggacgcaagattgagctggcacggaccaagaatctggcgacccgtttcgacaagttgctttcgacactgaagtccgcataa

SEQ ID NO: 636 - DNA, 954 bp, Pseudomonas vranovensis
atgggcagaagcaatagtgtcaacaaactgttggaagaagagaaaaagaaccgtgaacggcttgagcagatctccagggacttgatcacccaacagaaaaatgctgaatccgaattacaggcagaccagattcaattttatacaaacagccaacgcacctggaagtattcttcctacgtcaccggggcgaattcagatttccagctttcagacacctggagccttgagaatctgaagaaaataatcgatcagatcaccaatgcagtcgtcggcacggtcaccggtaccatcaccggtctgccggaaggtaccacggcctcgcctgatgcaaccaaaaccaacgccagcggtggtttgaccgaagacactcggctaatgatcgccgcaaactgccttaacctgctgtcgggcctgatcaactcgttcggccactcaagcaagattcaggtgagcactgcaaaaagtagcgtgccgctcggccaaggcttgagaatttttgcatcggttgcctgcaatgtgtctcaggagcgaagtttcttcaataacaaaatcatgagctgctaccgctattgctacaacgtcaactattcactcgacgagttctccgagcaagccgaaagaacattggttgcacagtacgagttgaccctcaacgcactgaacaccgcggcaaaactcaactatgacaacttcgtttcaaaacagatcgatattcgccaatacatggagaccgccgactacattgaagaaaaaaccgtgcaagtcgttgccaagatcgaagcattaaaacgtaaagatggtgaccttgccggtatttccacgctgtaccaaaaacaactggcattccttcaaggttgcaaggtcgagtttggctttgacagcaaggtttcgacacatattcaagggcaggtggataaattctccggtgattcgaaagttgcactaggcaaacgt

SEQ ID NO: 637 - DNA, 954 bp, Pseudomonas poae
atgggtagaagcaatagcgttaaccggctcttggaagaagagaaaaagaaccgcgaccgacttgatcagatttccagggacttggtggtacagcaaaaaaatgccgagaccgaacttcaagccgaccaactacaattttacgtaaacagccaaagaacctggaaattctcgccttacgtaacaggtgcaaactcagactttcaaatgtctgagacatggagccttgagaatctaaaaaacataataaaccagatcaccaacgctgttgttgggaccgttacaggtcaaataactgggctccccgatggaacctcggcatcccctgatgcgacagcgaccaatgctaagggaggtttaacagaagatactcggctactaatcgcagtaaactgcctcaacctgctaacaggcattgtcaattcgttcggaaagtcaagcgcaattcaggttaacagtgcaaaaagcacaattccgatcggacaagggttaaggatttttgcatccgtagcctgcaacgtatcgcaagagcgcagtttttttaacaacaaagtaatgagctgctatcgttactgctacaacataagctactcgctcgacgaattcaccgagcaagcagaaagaacactagtcgcgcaatatgaactatcactaaacgcactaaactcagctgccaaagacaactacagtaattacacatccaagaaaattgacatccgtcaatatatggaaacagctgactaccttgaagaaaagactctccaagtgattgcaaaaatcaaagcacttaaaagcaaggacggcacgcttgcgggcatcaaatcgatctacaaagatcaaattgcattccttacaagctgtaagattgagtatgggtttgaccctgaagtatcaacccacatacaagcacaaatcaaaaaactttctggtgactcaaaagaggctctcgccacggct

SEQ ID NO: 638 - DNA, 927 bp, Pseudomonas protegens
atgggaactagtaatagtgtaaaaaaactgttggagaaaagtgagcgagatagaaagcgacttgaggaaattgataatgatctagaggctaaagtggctcatatgaaaaatgagcttagggaggaacaagggtatttttacgagaatagccagagaaactggaagttttcagattacgtgagtggtgctcattcggatttccagacctcggctacttggagtcttgataatctaagtgcaatgatccaaaatataactaacgctgttgtgggcgcattgggtcctgttaaggacttgccagatggtgcggaagtatctaagggtgtagcagagattaataaggacggcgggataacacaagatgtacgcttgttggtcgcggcaaattgcttgaatttactatcgggcattgtgaattcattcggcaagtctagcaaggtgcagattagctcggcgaaaaattcaattccaatcgggcaaggtttaaggatatttgctgccgtagcgtgtaatgttacgcaggagaaagggttttttgataataaagttatgaattgttatcgttatggatatcttattagctattcgcttgatgaatttattgaacaggcggaaatggctttggttgcccagtatgagttaacgctaaatgcatttaatatggcggccaaggataattataatgattttgttaataaggaaatcgatctaaggcagtataaagagacggctgatatgattgaggagatgacgattgaagtcattgaaaaaatcaaagctcttaatcaaaaagatggtgagtcagctagaacgcttactgtctataaaagccagattgagtttctcaaaagttgtcttgtgaattacggctttgactctgaggtttcaaagggaattaaggcgcagcttgtaaagctgtctaatttc

SEQ ID NO: 639 - DNA, 16 bp, Artificial Sequence
  16S ribosomal DNA primer
taccttgttacgactt

SEQ ID NO: 640 - DNA, 20 bp, Artificial Sequence
  16S ribosomal DNA primer
  misc_feature (12)..(12): m = a or c
agagtttgatcmtggctcag
